(19) United States
(12) Patent Application Publication
(10) Pub. No.: US 2007/0048748 A1
(43) Pub. Date: Mar. 1, 2007

(54) Mutant polymerases for sequencing and genotyping

(75) Inventors: John G.K. Williams, Lincoln, NE (US); Jon P. Anderson, Lincoln, NE (US); Teresa M. Urlacher, Wahoo, NE (US); David L. Steffens, Lincoln, NE (US)

Correspondence Address: TOWNSEND AND TOWNSEND AND CREW, LLP, TWO EMBARCADERO CENTER, EIGHTH FLOOR, SAN FRANCISCO, CA, 94111-3834, US

(73) Assignee: LI-COR, INC., Lincoln, NE (US)

(21) Appl. No.: 11/234,677

(22) Filed: Sep. 23, 2005

Related U.S. Application Data
(60) Provisional application No. 60/626,552, filed on Nov. 10, 2004.
(60) Provisional application No. 60/613,560, filed on Sep. 24, 2004.

(51) Int. Cl. C12Q 1/68; C07H 21/04; C12P 21/06; C12N 9/22; C12N 15/74; C12N 1/21

(52) U.S. Cl. 435/6; 435/69.1; 435/199; 435/252.3; 435/471; 536/23.2

(57) ABSTRACT

The invention relates to the discovery of novel mutant DNA polymerases that possess altered kinetics for incorporating phosphate-labeled nucleotides during polymerization. The invention further relates to the use of these mutant DNA polymerases in sequencing and genotyping methods.

### INCORPORATION BY REFERENCE

[0001] This application claims the benefit of U.S. Patent Application No. 60/613,560, filed Sep. 24, 2004, entitled “Composition and Method for Nucleic Acid Sequencing,” and U.S. Patent Application No. 60/626,552, filed Nov. 10, 2004, both of which are incorporated by reference herein, in their entirety and for all purposes.

### GOVERNMENT RIGHTS

[0002] The invention described herein was made with support from U.S. government grants P01 HG003015-01 0003 and R44 HG002292-02. Accordingly, the U.S. government may have certain rights in the invention.

### FIELD OF THE INVENTION

[0003] The invention relates to the discovery of novel mutant DNA polymerases that possess altered kinetics for incorporating phosphate-labeled nucleotides during polymerization. The invention further relates to the use of these mutant DNA polymerases in sequencing and genotyping methods.

### BACKGROUND OF THE INVENTION

[0004] The primary sequences of nucleic acids are crucial for understanding the function and control of genes and for applying many of the basic techniques of molecular biology. In fact, rapid DNA sequencing has taken on a more central role after the goal to elucidate the entire human genome has been achieved. DNA sequencing is an important tool in genomic analysis as well as other applications, such as genetic identification, forensic analysis, genetic counseling, medical diagnostics, and the like. With respect to the area of medical diagnostic sequencing, disorders, susceptibilities to disorders, and prognoses of disease conditions can be correlated with the presence of particular DNA sequences, or the degree of variation (or mutation) in DNA sequences, at one or more genetic loci. Examples of such phenomena include human leukocyte antigen (HLA) typing, cystic fibrosis, tumor progression and heterogeneity, p53 proto-oncogene mutations, and ras proto-oncogene mutations (see, Gyllensten et al., PCR Methods and Applications, 1:91-98 (1991); U.S. Pat. No. 5,578,443, issued to Santamaria et al.; and U.S. Pat. No. 5,776,677, issued to Tsui et al.).

[0005] Various approaches to DNA sequencing exist. The dideoxy chain termination method serves as the basis for all currently available automated DNA sequencing machines, whereby labeled DNA elongation is randomly terminated within particular base groups through the incorporation of chain-terminating inhibitors (generally dideoxynucleoside triphosphates) and size-ordered by either slab gel electrophoresis or capillary electrophoresis (see, Sanger et al., Proc. Natl. Acad. Sci., 74:5463-5467 (1977); Church et al., Science, 240:185-188 (1988); Hunkapiller et al., Science, 254:59-67 (1991)). Other methods include the chemical degradation method (see, Maxam et al., Proc. Natl. Acad. Sci., 74:560-564 (1977), whole-genome approaches (see, Fleischmann et al., Science, 269:496 (1995)), expressed sequence tag sequencing (see, Velculescu et al., Science, 270 (1995)), array methods based on sequencing by hybridization (see, Koster et al., Nature Biotechnology, 14:1123 (1996)), highly parallel pyrosequencing, and single molecule sequencing (SMS) (see, Jett et al., J. Biomol. Struct. Dyn. 7:301 (1989); Schecker et al., Proc. SPIE-Int. Soc. Opt. Eng. 2386:4 (1995)).

[0006] There have been several improvements in the dideoxy chain termination method since it was first reported in the mid-1980s with enhancements in the areas of separating technologies (both in hardware formats & electrophoresis media), fluorescence dye chemistry, polymerase engineering, and applications software. The emphasis on sequencing the human genome with a greatly accelerated timetable along with the introduction of capillary electrophoresis instrumentation that permitted more automation with respect to the fragment separation process allowed the required scale-up to occur without undue pressure to increase laboratory staffing. However, despite such enhancements, the reductions in the cost of delivering finished base sequence have been marginal, at best.

[0007] In general, present approaches to improve DNA sequencing technology have either involved: (1) a continued emphasis to enhance throughput while reducing costs via the dideoxy chain termination method; or (2) a paradigm shift away from the dideoxy chain termination method such as sequencing by a non-electrophoretic method.

[0008] Although several non-electrophoretic DNA sequencing methods have been demonstrated or proposed, all are limited by short read lengths. For example, matrix-assisted laser desorption/ionization (MALDI) mass spectrometry, which separates DNA fragments by molecular weight, is only capable of determining about 50 nucleotides of DNA sequence due to fragmentation problems associated with ionization. Other non-electrophoretic sequencing methods depend on the cyclic addition of reagents to sequentially identify bases as they are either added or removed from the subject DNA. However, these procedures all suffer from the same problem as the classical Edman degradation method for protein sequencing, namely that synchronization among molecules decays with each cycle because of incomplete reaction at each step. As a result, current non-electrophoretic sequencing methods are unsuitable for sequencing longer portions of DNA.

[0009] The DNA polymerases employed in known sequencing methods are thermophilic or thermostable DNA polymerases such as Taq DNA polymerase derived from the bacterium Thermus aquaticus, Pfu DNA polymerase derived from the bacterium Pyrococcus furiosus, Tli DNA polymerase (also called Vent polymerase) derived from the bacterium Thermococcus litoralis and others. Thermostable DNA polymerases also play a crucial role in current methods of DNA amplification and sequencing. Some improvements in these methods have been made in recent years, particularly in DNA sequencing and the polymerase chain reaction. There are a number of mutants that have been generated, for example, DNA polymerase mutants that lack exonuclease activity (e.g., Vent_{R}® (exo-) DNA polymerase and Deep Vent_{R}™ (exo-) DNA polymerase from New England Biolabs; Therminator™ DNA polymerase from New England Biolabs; and KOD Hifi™ DNA polymerase from Novagen).

[0010] One of the most important characteristics of thermostable polymerases is their error rate. Error rates are measured using different assays, and as a result, estimates of error rates may vary, particularly from one laboratory to another. Polymerases lacking 3′→5′ exonuclease activity generally have higher error rates than polymerases with exonuclease activity. The total error rate of Taq polymerase has been variously reported between 1×10⁻⁴ to 2×10⁻⁵ errors per base pair. Pfu polymerase appears to have the lowest error rate at about 1.5×10⁻⁶ error per base pair, and Tli polymerase is known to be intermediate between Taq and Pfu. Although error rate is a significant factor when choosing a DNA polymerase, it is not the only factor. Reliability, stability and catalytic rate of the enzyme are equally important.

[0011] Clearly, there is an untapped potential in genetically modified DNA polymerases, which could provide significant advantages over their natural counterparts that are used today. There is indeed a need for more effective and efficient enzymes that can be used in methods of non-electrophoretic DNA sequencing. The present invention satisfies this and other needs.

### BRIEF SUMMARY OF THE INVENTION

[0012] The present invention provides novel mutant DNA polymerases that possess altered kinetics for incorporating phosphate-labeled nucleotides during polymerization. One major advantage of the mutant polymerases of the present invention is their faster incorporation kinetics for phosphate-labeled deoxynucleotide-triphosphates (dNTPs) during polymerization of DNA strands in comparison to native DNA polymerases. Another advantage of the present invention is that the mutant DNA polymerases reduce the cost of sequencing and genotyping due to their altered kinetics (e.g., faster kinetics). As such, the mutant DNA polymerases can be employed in various methods, including single-molecule DNA sequencing and genotyping methods.

[0013] In one embodiment, the present invention provides a mutant DNA polymerase, wherein the amino acid sequence of the phosphate region of said mutant DNA polymerase comprises two or more mutations not present in the phosphate region of the most closely related native DNA polymerase, and wherein said two or more phosphate region mutations increase the rate at which said mutant DNA polymerase incorporates phosphate-labeled nucleotides. In a related embodiment, the mutant DNA polymerase, or at least the phosphate region of said mutant polymerase, is derived from a Family A or Family B polymerase. In yet another related embodiment, the mutant DNA polymerase is a chimera combining homologous regions from distinct polymerases (as described, e.g., by Wang et al., J. Biological Chemistry, 270:26558-26564 (1995); Villbrandt et al., Protein Engineering, 13:645-654 (2000); Boudsocq et al., J. Biological Chemistry, 279:32932-32940 (2004)). For example, the phosphate region of one polymerase could be swapped for the phosphate region of another polymerase to create a new chimera.

[0014] In another embodiment, the invention provides a mutant 9°N DNA polymerase, wherein the amino acid sequence of the phosphate region of the 9°N DNA polymerase comprises two or more mutations not present in the phosphate region of native 9°N DNA polymerase, and wherein the two or more phosphate region mutations increase the rate at which said mutant DNA polymerase incorporates phosphate-labeled nucleotides. In a related embodiment, the mutant 9°N DNA polymerase incorporates phosphate-labeled nucleotides at an increased rate relative to 9°N-A485L DNA polymerase (SEQ ID NO: 2), comprises an alanine to leucine mutation at amino acid position 485, and further comprises one or more additional mutations in its phosphate region. In yet another related embodiment, the one or more additional mutations are selected from the group consisting of a mutation at amino acid position 352, 355, 408, 460, 461, 464, 480, 483, 484, and 497, and combinations thereof. In another related embodiment, the mutant 9°N DNA polymerase comprises a mutation at amino acid position 484 as one of the additional mutations. In yet another related embodiment, the additional mutations include mutations at amino acid positions 408, 464, and 484. In some embodiments of the mutant 9°N DNA polymerase of the invention, the mutation at position 408 is selected from the group consisting of tryptophan, glutamine, histidine glutamic acid, methionine, asparagine, lysine, and alanine; the mutation at position 464 is selected from the group consisting of glutamic acid and proline; and the mutation at position 485 is tryptophan. In yet another related embodiment, the amino acids at positions 408, 464, and 484 in the mutant 9°N DNA polymerase are tryptophan, glutamic acid, and tryptophan, respectively.

[0015] In another embodiment, the invention provides a mutant DNA polymerase comprising an amino acid sequence region homologous to amino acids 325 to 340 of SEQ ID NO:2, wherein the region contains at least one mutation and wherein the mutant DNA polymerase incorporates phosphate-labeled nucleotides at an increased rate relative to a 9N-A485L DNA polymerase (SEQ ID NO:2). In a preferred embodiment, the at least one mutation is at an amino acid position selected from the group consisting of amino acid positions 329, 332, 333, 336 and 338. In another preferred embodiment, the mutant DNA polymerase comprises an insertion or a deletion of at least 1 amino acid in an amino acid sequence region homologous to amino acids 325 to 340 of SEQ ID NO:2. In a related embodiment, the at least one mutation is an insertion or a deletion of at least 10 amino acids. In yet another embodiment, the at least one mutation is an insertion of amino acids REAQLSEFFPT at position 329.

[0016] In yet another embodiment, the invention provides a mutant DNA polymerase comprising an amino acid sequence region homologous to amino acids 473 to 496 of SEQ ID NO: 2, wherein the region contains at least one mutation and wherein the mutant DNA polymerase incorporates phosphate-labeled nucleotides at an increased rate relative to 9N-A485L DNA polymerase (SEQ ID NO: 2). In a related embodiment, the at least one mutation is at an amino acid position selected from the group consisting of amino acid positions 480, 483, 484 and 485. In another preferred embodiment, the mutant DNA polymerase comprises an insertion or a deletion of at least 1 amino acid in an amino acid sequence region homologous to amino acids 473 to 496 of SEQ ID NO:2. In a related embodiment, the at least one mutation is an insertion or a deletion of at least 10 amino acids. In yet another embodiment, the at least one mutation in the DNA polymerase is an insertion at a position corresponding to position 485 in SEQ ID NO:2 of an amino acid sequence selected from the group consisting of PIKILANSYRQRW, TIKILANSYRQRQ and PIKILANLDYRQRL. In yet another embodiment, the mutant DNA polymerase comprises the mutated sequence of amino acids found at region 473 to 496 in any of the DNA polymerase sequences set forth in SEQ ID NO: 4 through SEQ ID NO: 750, and wherein the mutant DNA polymerase comprises the mutated sequence at a region which is homologous to region 473 to 496 in SEQ ID NO: 2.

[0017] In another embodiment, the invention provides a mutant DNA polymerase, wherein the mutant DNA polymerase incorporates phosphate-labeled nucleotides at an increased rate relative to 9N-A485L DNA polymerase (SEQ ID NO: 2), and comprises (i) a first amino acid sequence region homologous to amino acids 325 to 340 of SEQ ID NO:2, wherein this first region contains at least one mutation; and (ii) a second amino acid sequence region homologous to amino acids 473-496 of SEQ ID NO:2, wherein this second region contains at least one mutation. In a related embodiment, the at least one mutation in the first region is at an amino acid position selected from the group consisting of amino acid positions 329, 332, 333, 336 and 338, and the at least one mutation in the second region is at an amino acid position selected from the group consisting of amino acid positions 480, 483, 484 and 485. In certain embodiments, the mutations include insertions or deletions of one or more amino acids in the two regions, including insertions or deletions of up to ten or more amino acids. In one embodiment, the mutation in the first region is an insertion of amino acids REAQLSEFFPT at the position corresponding to position 329 in SEQ ID NO: 2 and the mutation in the second region is an insertion of PIKILANSYRQRW at the position corresponding to position 485 in SEQ ID NO: 2. In yet another embodiment, the first region in the mutant polymerase comprises the mutated sequence of amino acids found at region 325 to 340 in any of the DNA polymerase sequences set forth in SEQ ID NO: 4 through SEQ ID NO: 750, and the second region comprises the mutated sequence of amino acids found at region 473 to 496 in any of the DNA polymerase sequences set forth in SEQ ID NO: 4 through SEQ ID NO: 750.

[0018] The invention also provides a mutant 9°N DNA polymerase comprising at least two mutations in the phosphate region, including an A485L mutation, wherein the mutant 9°N DNA polymerase incorporates phosphate-labeled nucleotides at an increased rate relative to 9°N-A485L DNA polymerase (SEQ ID NO: 2), and wherein the increased rate is at least three times, at least seven times, at least twenty times, or at least fifty times faster than that catalyzed by 9°N-A485L DNA polymerase, as based on primer extension assays analyzed on polyacrylamide gels.

[0019] In yet another embodiment, the invention provides the mutant 9°N DNA polymerase of SEQ ID NO. 568. In a related embodiment, the invention provides the mutant 9°N DNA polymerase of SEQ ID NO. 568, where the mutant sequence further comprises one or more additional mutations and wherein the one or more additional mutations are selected from the group consisting of an alteration in amino acid identity, an insertion of one or more amino acids, and the deletion of one or more amino acids. In yet another related embodiment, the mutant 9°N DNA polymerase includes one mutation relative to SEQ ID NO. 568, wherein said additional mutation is in the phosphate region of the mutant 9°N DNA polymerase. In a related embodiment, the additionally mutated amino acid is selected from the group consisting of the asparagine at position 491 and lysine at position 487.

[0020] In another embodiment, the invention provides a mutant 9°N DNA polymerase of SEQ ID NO. 568 and conservative modifications thereof. Examples of conservative amino acid mutations are well-known in the art and described, e.g., in U.S. patent set forth, for instance, in U.S. Pat. No. 5,364,934. In a related embodiment, the conservative mutations lie outside the phosphate region of said mutant polymerases.

[0021] The invention also provides a mutant 9°N DNA polymerase with an amino acid sequence selected from the group consisting of the even-numbered SEQ ID NOs 4 through 750. In a related embodiment, the invention provides a purified nucleic acid sequence encoding the amino sequence of any of the even-numbered SEQ ID NOs: 4 through 750. In a related embodiment, the invention provides a purified nucleic acid sequence encoding a polymerase represented by the group consisting of the even-numbered SEQ ID NOs: 4 through 750. In a related embodiment, the invention provides the nucleic acids of the odd-numbered SEQ ID NOs: 3-749.

[0022] The invention also provides a method for identifying polymerases with improved suitability for a nucleotide sequencing process, wherein the improved suitability is measured relative to that of a parent polymerase, comprising: (1) assaying the rate of phosphate-labeled nucleotide incorporation by a test mutant polymerase, wherein said phosphate region of said test polymerase is at least 90% identical to said parent polymerase; (2) determining if said rate of phosphate-labeled nucleotide incorporation by said test mutant polymerase is suitable for said nucleotide sequencing process; and, if said rate of phosphate-labeled nucleotide incorporation is suitable, then identifying the test mutant polymerase as such. In a related embodiment, the method includes an additional step, wherein if said rate of phosphate-labeled nucleotide incorporation is not suitable, steps (1) and (2) are repeated with a second test mutant polymerase until a suitable polymerase is identified. In yet another related embodiment, if said second test mutant comprises each of the mutations in the previous test mutant polymerase, and further comprises at least one additional mutation relative to the previous test mutant polymerase.

[0023] In a related embodiment of the method for identifying suitable polymerases, the parent polymerase is a thermostable polymerase. In yet another related embodiment, the amino acid sequence of said parent polymerase is at least 90% identical to the amino acid sequence of 9°N-A485L DNA polymerase (SEQ ID NO: 2). In yet another related embodiment, the amino acid sequence of said parent polymerase is at least 95% identical to the amino acid sequence of 9°N-A485L DNA polymerase (SEQ ID NO: 2). In yet another related embodiment, the improved polymerase is a polymerase which incorporates between 1 and 20 phosphate-labeled nucleotides per second or, preferably, between 5 and 15 phosphate-labeled nucleotides per second. In yet another embodiment of the method, the sequencing process suitable for the improved polymerase is a field-switch polynucleotide sequencing process.

[0024] In another embodiment, the invention provides a mutant DNA polymerase, wherein the amino acid sequence of the phosphate region of the mutant DNA polymerase comprises one or more mutations not present in the phosphate region of the most closely related native DNA polymerase, and wherein the one or more phosphate region mutations increase the rate at which the mutant DNA polymerase incorporates a phosphate-labeled nucleotide. In a related embodiment, the mutant DNA polymerase is a Family A DNA polymerase. In yet another related embodiment, the mutant DNA polymerase is a mutant Klenow DNA polymerase.

[0025] In another related embodiment, the invention provides a mutant Klenow polymerase which incorporates phosphate-labeled nucleotides at an increased rate relative to the Klenow DNA polymerase of SEQ ID NO: 752, wherein the mutant Klenow DNA polymerase comprises one or more phosphate region mutations. In a related embodiment, the additional mutations are selected from the group consisting of a mutation at amino acid position 423 and 504, and combinations thereof. In yet another related embodiment of the mutant Klenow DNA polymerase, the amino acid at position 423 is mutated or, alternately, the amino acid at position 504 is mutated. In certain related embodiments, the amino acid at position 423 is lysine or glutamic acid, and the amino acid at position 504 is glycine. In yet another related embodiment, the mutant Klenow DNA polymerase incorporates phosphate-labeled nucleotides at a rate at least three times faster than the Klenow polymerase of SEQ ID NO: 752. In yet another related embodiment, the invention provides the mutant Klenow DNA polymerases of SEQ ID NO: 756, 758, or 764, as well as polymerases with conservative mutations or mutations which do not substantially alter the rate at which the mutant polymerase incorporates phosphate-labeled nucleotides. In yet another related embodiment, the invention provides purified nucleic acids encoding the mutant Klenow DNA polymerases of the invention.

[0026] In another embodiment, the invention provides a mutant DNA polymerase, wherein the amino acid sequence of the phosphate region of the mutant DNA polymerase comprises one or more mutations not present in the phosphate region of the most closely related native DNA polymerase, and wherein the one or more phosphate region mutations increase the rate at which the mutant DNA polymerase incorporates a phosphate-labeled nucleotide, wherein the mutant DNA polymerase is a mutant Taq DNA polymerase. In a related embodiment, the mutant Taq DNA polymerase incorporates phosphate-labeled nucleotides at an increased rate relative to the Taq DNA polymerase of SEQ ID NO: 766.

[0027] In a related embodiment, the mutant Taq mutations are selected from the group consisting of a mutation at amino acid positions 589, 617, 645, 691, 673, and 726, and combinations thereof. In a related embodiment, the amino acid at position 617 is isoleucine. In yet another related embodiment, the mutated amino acid at position 645 is selected from the group consisting of histidine, phenylalanine, lysine and tryptophan. In yet another releated embodiment, the amino acid at position 691 is tyrosine. In yet another related embodiment, the amino acid at position 693 is glycine. In yet another related embodiment, the amino acid at position 726 is serine. In yet another related embodiment, the amino acid at position 589 is aspartic acid and the amino acid at position 645 is histidine. In yet another related embodiment, the mutant Taq DNA polymerase of the invention incorporates phosphate-labeled nucleotides at a rate at least two times faster, or between five and fifteen times faster, than the Taq polymerase of SEQ ID NO: 766. In yet another embodiment, the invention provides the mutant Taq DNA polymerase of SEQ ID NO: 768, 770, 772, 774, 776, 778, 780, 782 or 784, as well as derivatives of these mutant Taq DNA polymerases with additional conservative mutations or mutations which do not substantially alter the rate at which the mutant polymerase incorporates phosphate-labeled nucleotides. In yet another related embodiment, the invention provides purified nucleic acids encoding the mutant Taq DNA polymerases of the invention.

[0028] The invention additionally provides a mutant DNA polymerase selected from the group consisting of the mutant DNA polymerases represented by the even-numbered sequences of SEQ ID NOs: 4-750, 754-764, and 768-784, as well as a mutant DNA polymerase wherein the phosphate region of said mutant DNA polymerase is identical to the phosphate region of a polymerase selected from the group consisting of the mutant DNA polymerases represented by the even-numbered sequences of SEQ ID NOs: 4-750, 754-764, and 768-784. In a related embodiment, the invention provides a mutant DNA polymerase selected from the group consisting of the mutant DNA polymerases represented by the even-numbered sequences of SEQ ID NOs: 4-750, wherein the mutant DNA polymerase incorporates phosphate-labeled nucleotides at an increased rate relative to the DNA polymerase of SEQ ID NO: 2. In another related embodiment, the invention provides a mutant DNA polymerase selected from the group consisting of the mutant DNA polymerases represented by the even-numbered sequences of SEQ ID NOs: 754-764, wherein the mutant DNA polymerase incorporates phosphate-labeled nucleotides at an increased rate relative to the DNA polymerase of SEQ ID NO: 752. In yet another related embodiment, the invention provides a mutant DNA polymerase selected from the group consisting of the mutant DNA polymerases represented by the even-numbered sequences of SEQ ID NOs: 768-784, wherein said mutant DNA polymerase incorporates phosphate-labeled nucleotides at an increased rate relative to the DNA polymerase of SEQ ID NO: 766.

[0029] In a preferred embodiment, the phosphate-labeled nucleotides incorporated by the mutant DNA polymerases of the invention are γ-phosphate-labeled nucleotides. In one embodiment, the polymerase incorporates phosphate-labeled nucleotides in which the label is a moiety capable of complexing with DNA. The DNA-complexing moiety may include intercalating dyes (e.g., FIG. 6), major-groove binders, minor-groove binders and moieties capable of covalent crosslinking to DNA. In yet another embodiment, the polymerase incorporates phosphate-labeled nucleotides where the label is a single or double-stranded oligonucleotide, i.e., an oligoLabel. In one aspect, the oligoLabel is attached to the gamma phosphate of the nucleotide triphosphate through a linker. In related embodiments, the linker may be attached to the oligoLabel by non-covalent bonds (e.g., hydrophobic or electrostatic associations, as depicted in FIG. 7) or covalent bonds (e.g., an amide bond, as depicted in FIG. 8).

[0030] In yet another embodiment, the invention provides mutant DNA polymerases which substantially lack exonuclease activity. In still another embodiment, the mutant DNA polymerases provided by the invention are derived from a family B polymerase. In yet another embodiment, the mutant DNA polymerases provided by the invention are derived from a family A polymerase. In a preferred embodiment, the amino acid sequence of the mutant DNA polymerase is derived from the amino acid sequence of a polymerase selected from the group consisting of a 9°N DNA polymerase derived from Thermococcus species 9°N-7; a Tli DNA polymerase derived from Thermococcus litoralis; a DNA polymerase derived from Pyrococcus species GB-D; a KOD1 DNA polymerase derived from Thermococcus kodakaraensis; a Taq DNA polymerase derived from Thermus aquaticus; a Phi-29 polymerase derived from Bacillus subtilis phage phi-29; and a polymerase I Klenow fragment derived by proteolysis from the bacterium Escherichia coli (Henningsen, K., PNAS, 65:168 (1970); Brutlag et al., BBRC, 37:982 (1969); Setlow et al., JBC 247:224 (1972); Setlow, P. and Kornberg, A., JBC, 247:232 (1972)). The sequences of these native DNA polymerases are set forth in Table 6.

[0031] In another embodiment of the invention, any of the mutant DNA polymerases set forth in SEQ ID NO: 4 through SEQ ID NO: 750 (9°N mutants), SEQ ID 754-764 (Klenow mutants) or SEQ ID NO: 767 through SEQ ID NO: 784 (Taq mutants) can be used for DNA sequencing and/or genotyping. DNA sequencing methods include, but are not limited to, single-molecule sequencing, such as field-switch sequencing, charge-switch sequencing and/or electrokinetic sequencing. See, e.g., U.S. Pat. Nos. 6,232,075; 6,306,607; and 6,762,048; see also U.S. Pat. Nos. 6,936,702 and 6,869,764. Preferably, the mutant DNA polymerases are used in single-molecule sequencing or single-molecule genotyping. In another preferred embodiment, the mutant polymerases selected are those which exhibit increased rates of incorporation of phosphate-labeled nucleotides relative to, e.g., the parent polymerases whose amino sequences are provided by SEQ ID NO: 2, SEQ ID NO: 752 or SEQ ID NO: 756.

[0032] The instant invention also provides improved sequencing and genotyping methods that employ the mutant DNA polymerases. Particularly, the invention contemplates a method of DNA sequencing, wherein the method comprises (i) immobilizing at least one complex comprising a target nucleic acid, a primer nucleic acid, and a mutant DNA polymerase onto a surface; (ii) contacting the surface with a plurality of charged particles comprising at least one type of phosphate-labeled nucleotide triphosphate (NTP) (e.g., γ-phosphate-labeled NTP) by applying an electric field; (iii) reversing the electric field to transport unbound charged particles away from the surface; and (iv) detecting the incorporation of a phosphate-labeled NTP into a single molecule of the primer nucleic acid. The mutant DNA polymerase employed in this method can preferably be any of the mutant DNA polymerases represented by the even-numbered sequences of SEQ ID NOs: 4-750, 754-764, and 768-784. The phosphate-labeled NTPs can be further labeled with polyethylene glycol (PEG). The incorporation of an NTP can be detected by a total internal reflection fluorescent microscope or other detection devices.

[0033] The method of DNA sequencing can employ immobilizing at least one complex including a target nucleic acid, a primer nucleic acid, and a mutant DNA polymerase onto a surface that is an indium-tin oxide (ITO) electrode coated by a permeation layer. Complexes can be immobilized onto the surface by covalent bonding, non-covalent bonding, ionic bonding or the like. The method of DNA sequencing can employ contacting the surface with a plurality of charged particles. The charged particles include, but are not limited to, nanoparticles, charged polymers (e.g., DNA), and combinations thereof. The charged particles can further comprise at least one dye. In addition, the nanoparticles can be silica-DNA nanoparticles. For example, electrokinetic DNA sequencing can be performed in a two-electrode chamber such as a microtiter plate fitted with two electrodes. One advantage of this method is that over two-hundred different single DNA molecules can be sequenced simultaneously in a single well at a maximum rate of about 10 to about 200 nucleotides per second per molecule and at read lengths of 20 kilobases (kb) or more. Another advantage of this method is the lower cost of sequencing as compared to other long read approaches due to the high degree of multiplexing and the substitution of microtiter plates for expensive micro- or nano-fabricated devices.

[0034] In an additional embodiment, the invention provides mutant polymerases wherein the mutant polymerases have one, two, or more anchor sequences for immobilizing the polymerases on a solid surface and/or associating the polymerase with a target nucleic acid, in order to increase the processivity index of the polymerase. DNA polymerases comprising such anchor sequences are described, e.g., in U.S. patent application Ser. No. 10/821,689 (published as 2005/0042633A1), incorporated herein by reference.

[0035] The invention further encompasses methods of DNA genotyping. Such methods can employ genotyping by sequencing specific DNA segments from the target genome or randomly-selected DNA segments from the target genome to identify a subset of the genetic variation. Alternatively, efficient sequencing via the methods of the present invention can provide information about a complete genotype (i.e., by sequencing the entire genome). Sequence analysis performed using the polymerases and/or methods of the present invention can provide reads up to 20 kilobases and longer. Such long reads, each originating from a single DNA molecule, allow determination of haplotypes and long-range genomic rearrangements that are generally difficult to obtain with known sequencing and genotyping methods.

[0036] Other objects, features, and advantages of the present invention will be apparent to one of skill in the art from the following detailed description and figures.

### BRIEF DESCRIPTION OF THE DRAWINGS

[0037] The present invention is best understood when read in conjunction with the accompanying figures which serve to illustrate the various embodiments. It is understood, however, that the invention is not limited to the specific embodiments disclosed in the figures.

[0038] FIG. 1 shows an alignment of amino acid sequences of five Family B DNA polymerases. Residues conserved between the various polymerases are shown in bold. Abbreviations: 9N_pol: 9°N DNA polymerase; Kod1_pol: DNA polymerase from Thermococcus kodakaraensis; PWO: DNA polymerase from Pyrococcus woesei; Pfu: DNA polymerase from bacterium Pyrococcus furiosus; Vent: Thermococcus litoralis DNA polymerase.

[0039] FIG. 2 shows a nucleotide configuration in a method of the present invention in which dNTPs are attached to a nanoparticle by a linker to the γ-phosphate group. This sort of nucleotide is included within the definition of the term “phosphate-labeled nucleotide,” a substrate of the mutant DNA polymerases described herein.

[0040] FIG. 3 shows an electrokinetic cycle in an electrokinetic sequencing method that employs the mutant DNA polymerases. FIG. 3A illustrates the accumulation of negatively-charged particles above immobilized polymerase-DNA complexes on a positively-charged indium-tin oxide (ITO) electrode. FIG. 3B illustrates the movement of unbound particles away from the ITO electrode when the electric field is reversed. The ITO electrode surface is illuminated by total internal reflection (arrows) and the particles retained by the polymerase-DNA complexes are imaged.

[0041] FIG. 4 (left) shows a diagram of a circular template that is permanently associated with an anchored mutant DNA polymerase of the present invention, while still being able to slide through the DNA binding groove to permit primer extension. The tunnel formed by polymerase immobilization is roughly the same dimension as a DNA sliding clamp. FIG. 4 (right) shows the crystal structure of Therminator™ polymerase with 6×His engineered loops inserted at positions K53 and K229. The open/closed conformational change involves movement of the helices O and N as shown to admit a nucleotide to the binding pocket. DNA (“ssDNA template”) in the DNA binding cleft is also shown.

[0042] FIG. 5 depicts the structure of dUTP-PEG8-P2-AlexaFluor633 (a γ-labeled NTP), a nucleotide triphosphate attached to a dye and linker by a nitrogen-phosphorous bond.

[0043] FIG. 6 depicts a terminal phosphate-labeled nucleotide in which the label is an intercalating dye, JOJO-1, capable of complexing with DNA.

[0044] FIG. 7 depicts an oligoLabel joined to a nucleotide, wherein the oligoLabel is attached to the nucleotide (dCTP) via non-covalent interactions with JOJO-1 and a linker.

[0045] FIG. 8 depicts a covalent crosslinked complex between psoralen and an oligoLabel.

[0046] FIG. 9 depicts steps in the enzymatic pathway of DNA replication by polymerases. The action of a variety of DNA polymerases can be defined by a reaction pathway that describes the steps involved in the process of DNA replication. This pathway is typically presented in six steps as shown in FIG. 9 (see, e.g., Joyce, C. M. and Benkovic, S. J., Biochemistry, 43:14317-14324 (2004)). Step 1, binding of DNA by the polymerase; Step 2, binding of dNTP by the polymerase-DNA complex; Step 3, rearrangement of secondary structure elements from “open” (E_{O}) to “closed” (E_{C}) conformation (seen in most polymerases, but not all), followed by additional unspecified conformational changes and binding of Mg²⁺ ions to form the active site (Steps 3.1 and 3.2); Step 4, phosphoryl transfer attaching the nucleotide to the DNA; Step 5, reversal of earlier conformational changes to restore the open conformation of the enzyme; and Step 6, release of pyrophosphate (PPi). In most polymerases studied, the rate-limiting step occurs between Steps 3 and 4 (Shah et al., J. Biol. Chem., 276:10824-10831 (2001); Arndt et al., Biochemistry, 40:5368-5375 (2001); Purohit et al., Biochemistry, 42:10200-10211 (2003); Fidalgo da Silva et al., J. Biol. Chem., 277:40640-40649 (2002); Rothwell et al., Molecular Cell, 19:345-355 (2005); Yang et al., Biophysical Journal, 86:3392-3408 (2004)).

[0047] FIG. 10 shows the results of a gel extension assay using saturating amounts of the selected purified polymerases.

[0048] FIG. 11 shows the analysis of the assay described in FIG. 10, including the average rate (nucleotides per second) for each of the indicated enzymes.

[0049] FIG. 12 shows steps in the identification of the phosphate region of 9°N DNA polymerase (see Example 3). FIG. 12a shows 9°N DNA polymerase holoenzyme (1QHT.pdb) superposed with DNA and TTP from RB69 polymerase (1IG9.pdb). FIG. 12b shows amino acids selected from FIG. 12a by proximity to dTTP (within 15 Å) and constrained by location between the gamma-phosphate of the dTTP and the enzyme surface. FIG. 12c shows the secondary structural elements in 9N DNA polymerase containing amino acids identified in FIG. 12b.

### DETAILED DESCRIPTION OF THE INVENTION

### I. Definitions

[0050] The following definitions are set forth to illustrate and define the meaning and scope of the various terms used to describe the invention herein. As such, the following terms have the meanings ascribed to them unless specified otherwise.

[0051] A “native DNA polymerase,” as used herein, is used to describe DNA polymerases that have not previously been genetically altered or modified as described herein. Examples of native DNA polymerases include, but are not limited to, a 9°N DNA polymerase derived from Thermococcus species 9°N-7; a Tli DNA polymerase derived from Thermococcus litoralis; a DNA polymerase derived from Pyrococcus species GB-D; a KOD1 DNA polymerase derived from Thermococcus kodakaraensis; a native Taq DNA polymerase derived from Thermus aquaticus; a native Phi-29 polymerase derived from Bacillus subtilis phage phi-29; and a polymerase I Klenow fragment derived from the bacterium Escherichia coli. Sequences of representative native DNA polymerase sequences are provided in Table 6. Native DNA polymerases may be used as parent polymerases in methods of the invention which relate to the identification of mutant polymerases, derived from the parent polymerases, which exhibit altered and typically improved kinetics of incorporating phosphate-labeled nucleotides.

[0052] The term “mutant DNA polymerase” refers to any DNA polymerase that has been genetically altered such that it contains one or more mutation (e.g., point mutation(s), deletion(s), insertion(s) and the like) in its polypeptide sequence compared to a native DNA polymerase of the same species.

[0053] The term “altered kinetics” means that the rate of polymerization (i.e., the incorporation of nucleotides into a DNA strand) of a DNA polymerase has been changed (e.g., increased or decreased) as compared to the rate of polymerization displayed by a naturally occurring or native DNA polymerase, and includes effects on the reaction mechanism that impact nucleotide binding and incorporation of the nucleotide.

[0054] The term “homologous position” means, for the purpose of the specification and claims, an amino acid position in a genetically altered polypeptide sequence of a specific protein (e.g., a mutant DNA polymerase) that corresponds, or is similar in position or structure, to the amino acid position of the naturally occurring or native polypeptide sequence of the specific protein (e.g., a native DNA polymerase). For example, the genetically altered polypeptide sequence of a mutant DNA polymerase can exhibit a point mutation at amino acid position N, such that the amino acid at position N is changed from, e.g., alanine in the native polymerase sequence, to leucine in the mutant polymerase sequence. Amino acid positions identified within this document are numbered according to the reference sequence for each polymerase type unless otherwise noted, with mutants of 9°N DNA polymerase numbered according to amino acid positions of SEQ ID NO. 2, mutants of Klenow DNA polymerase according to amino acid positions of SEQ ID NO. 752, and mutants of Taq DNA polymerase according to amino acid positions of SEQ ID NO. 766. A more specific example would be the phosphate regions of DNA polymerases which, when mutated, result in altered or improved kinetics of nucleotide incorporation. The phosphate region of a DNA polymerase is described in more detail below and in the Examples provided herein. Other specific homologous positions in 9N-A485L polymerase, Taq polymerase and Klenow polymerase are shown in Table 4, below.

TABLE 4
Homologous Residues in Various DNA Polymerases

| 9N-A485L | Taq | Klenow |
|---|---|---|
| SEQ ID NO. 2 | SEQ ID NO. 766 | SEQ ID NO. 752 |
| R359 | R726 | L504 |
| L408 | I645 | I423 |
| R484 | R691 | R469 |
| A485 | A693 | A471 |
| E598 | V617 | V395 |

[0055] The term “oligonucleotide” as used herein includes oligomers of nucleotides or analogs thereof, including deoxyribonucleosides, ribonucleosides, and the like. Typically, oligonucleotides range in size from a few monomeric units, e.g., 3-4, to several hundreds of monomeric units. Whenever an oligonucleotide is represented by a sequence of letters, it will be understood that the nucleotides are in 5′-3′ order from left to right and that “A” denotes deoxyadenosine, “C” denotes deoxycytidine, “G” denotes deoxyguanosine, “T” denotes thymidine, and “U” denotes deoxyuridine unless otherwise noted.

[0056] The term “nucleotide” as used herein refers to a phosphate ester of a nucleoside, e.g., mono-, di-, tri-, tetra-, penta-, polyphosphate esters, wherein the most common site of esterification is the hydroxyl group attached to the C-5 position of the pentose. Nucleosides also include, but are not limited to, synthetic nucleosides having modified base moieties and/or modified sugar moieties, e.g., described generally by Scheit, Nucleotide Analogs, John Wiley, N.Y. (1980). Suitable NTPs include both naturally occurring and synthetic nucleotide triphosphates, and are not limited to, ATP, dATP, CTP, dCTP, GTP, dGTP, TTP, dTTP, UTP, and dUTP. Preferably, the nucleotide triphosphates used in the methods of the present invention are selected from the group consisting of dATP, dCTP, dGTP, dTTP, dUTP, and combinations thereof. Preferably, nucleotide triphosphates are used, however, other phosphates such as mono-, di-, tetra-, penta-, and polyphosphate esters can also be used.

[0057] The terms “phosphate-labeled nucleotide triphosphate (NTP)” and “phosphate-labeled deoxynucleotide-triphosphate (dNTP)” are used interchangeably herein, and refer to any nucleotide (i.e., natural or synthetic) that contains a detectable label on any of its phosphate positions. The label, e.g., a dye, can be attached to the dNTP by a linker. The label or linker can be attached to the phosphate atom by a phosphorus-oxygen, phosphorus-nitrogen, phosphorus-sulfur, or phosphorus-carbon bond, for example, dUTP-PEG8-P2-AlexaFluor633 (see FIG. 5). The dNTP can also incorporate a polyethylene glycol (PEG) in addition to a dye label. For example, the dNTP can be a PEG-modified dNTP (e.g., dNTP with a PEG linker) with or without a dye label. One example of a phosphate-labeled nucleotide is a γ-labeled nucleotide. The term “γ-labeled” refers to a detectable label or an undetectable linker attached to any of the 3 phosphates on the nucleotide. The terms “γ-phosphate-labeled nucleotide triphosphate (NTP)” or “γ-phosphate-labeled deoxynucleotide-triphosphate (dNTP)” refer to any nucleotide (i.e., natural or synthetic) that contains a detectable label on its terminal, e.g., γ-phosphate, position. Preferably, nucleotide triphosphates are used, however other phosphates such as mono-, di-, tri, tetra-, penta-, and polyphosphate esters can also be used, wherein the label is preferably attached to the terminal phosphate, but may be attached to non-terminal phosphates. Certain labeled nucleotides suitable for use in the present invention include, but are not limited to, labeled nucleotides disclosed in for example, U.S. Pat. Nos. 6,232,075, 6,306,607, 6,936,702, 6,869,764, U.S. Patent Publication No. US2005/0042633, U.S. patent application Ser. No. 11/118,031, filed Apr. 29, 2005, Ser. No. 11/154,419, filed Jun. 15, 2005 and 60/648,091, filed Jan. 28, 2005. All of the foregoing patent publications and applications are incorporated herein by reference in their entirety.

[0058] The term “primer nucleic acid” refers to a linear oligonucleotide, which specifically anneals to a unique target nucleic acid sequence and allows for synthesis of the complement of the target nucleic acid sequence.

[0059] The phrase “target nucleic acid” refers to a nucleic acid or polynucleotide whose sequence identity or ordering or location of nucleosides is to be determined using the methods described herein.

[0060] The phrase “sequencing a nucleic acid,” in reference to a target nucleic acid, includes determination of partial as well as full sequence information of the target nucleic acid. That is, the term includes sequence comparisons, fingerprinting, and like levels of information about a target nucleic acid, as well as the express identification and ordering of nucleosides, usually each nucleoside, in a target nucleic acid. The term also includes the determination of the identification, ordering, and locations of one, two, or three of the four types of nucleotides within a target nucleic acid.

### II. Phosphate Region

[0061] DNA polymerases are classified into 6 families: A, B, C, X, Y and RT (Braithwaite et al., Nucleic Acids Res, 21:787 (1993); Delbos et al., J Exp Med, 201:1191 (2005); Hubscher et al., Annu Rev Biochem, 71:133 (2002); Ito and Braithwaite, Nucleic Acids Res, 19:4045 (1991); L. S. Kaguni, Annu Rev Biochem, 73:293 (2004); Southworth et al., Proc Natl Acad Sci USA, 93:5281 (1996); T. A. Steitz, J Biol Chem, 274:17395 (1999)). Family A polymerases perform both replication and repair functions, and include enzymes like Taq DNA polymerase, E. coli DNA polymerase I, T7 DNA polymerase and mitochondrial polymerase gamma. Family B polymerases include replicases such as the archaeal polymerase 9°N, the bacteriophage polymerases RB69 and phi-29, and the eukaryotic replicases alpha, delta and epsilon. Family C polymerases include bacterial replicases such as E. coli DNA polymerase III. Family X polymerases, involved in error-prone repair, include polymerases beta, lambda, mu, DP04 and terminal transferases. Finally, Family Y polymerases are the so-called lesion-bypass polymerases; they include polymerases eta, kappa, iota, and zeta. Polymerases within each family are structurally related. Structural models have been determined by x-ray crystallography for members of nearly every family.

[0062] The term “phosphate region” as used herein refers to a collection of secondary structure elements (i.e., helix, strand, coil) in a DNA polymerase which form a protein channel connecting, e.g., the γ-phosphate of a bound dNTP to the enzyme surface. As such, this channel would be occupied by a linker attached to the dNTP gamma-phosphate extending toward the enzyme surface. In one aspect of the invention described herein, DNA polymerases comprising phosphate region mutations exhibit improved utilization of phosphate-labeled dNTPs. Identification of the phosphate region of a particular polymerase is based on protein structures, which may be obtained from published databases of known structures, by x-ray crystallography, or by structural alignment to known structures.

[0063] A description of the method used to identify the phosphate region of DNA polymerases is provided in Example 3. The amino acid residues which comprise the phosphate regions of several specific DNA polymerases are listed in Table 5, below. The single-letter amino acid code and residue numbers are used to identify the regions. Letters next to the various listed regions indicate whether the secondary structure in that region is a part of a random coil (c), an α-helix (h), or β strand (s).

TABLE 5

| 9N (RB69DNA)* | | Taq | | Pol Beta | | Pol Eta | | HIV-RT | |
|---|---|---|---|---|---|---|---|---|---|
| (1QHT.PDB) | | (1QTM.PDB) | | (2BPF.PDB) | | (1JIH.PDB) | | (1RTD.PDB) | |
| c | Y261-V263 | s | G603-S612 | c | E147-R149 | s | 25-M31 | c | K1-V10 |
| h | I264-T267 | c | Q613 | s | I150-R152 | c | N32-A33 | c | P14-T27 |
| c | I268-T274 | h | I614-L622 | h | E153-K168 | h | F34-C43 | h | E28-E44 |
| c | E325-F327 | c | S623-D625 | c | G179-A185 | s | S58-S63 | c | G45 |
| h | P328-I337 | h | E626-E634 | s | E186-S188 | h | Y64-K68 | s | K46-S48 |
| h | L341-V344 | c | G635-D637 | c | T273-S275 | c | Y69-T76 | c | K49-T58 |
| c | S345-S347 | h | I638-F647 | h | D276-K289 | h | I77-K83 | s | P59-K65 |
| h | S348-K363 | c | G648-D655 | c | E309-E316 | c | C84-L87 | c | K66-T69 |
| h | S407-T415 | h | P656-Y671 | h | Q317-I232 | h | K268-N276 | s | K70-D76 |
| h | F448-K468 | h | A675-L682 | c | Q324-E335 | c | Y277-D281 | c | G112-S117 |
| h | P473-L489 | h | Y686-Q698 | | | s | A282-V286 | s | V118-K126 |
| c | A490-G498 | c | S699-P701 | | | c | C297-E310 | c | Y127-A129 |
| h | A553-N568 | h | K702-R717 | | | | | s | F130-I132 |
| c | P569-L577 | h | A796-G809 | | | | | c | P133-G141 |
| s | E578-V589 | c | V810-L817 | | | | | s | K142-L149 |
| | | s | E818-W827 | | | | | h | I195-R211 |
| | | | | | | | | c | W212-P226 |

*Amino acid numbering references the indicated protein database files.

### III. Native DNA Polymerases

[0064] Thermophilic DNA polymerases, like other DNA polymerases, catalyze template-directed synthesis of DNA from nucleotide triphosphates (NTPs). A primer having a free 3′ hydroxyl is required to initiate the synthesis of the DNA strand. The DNA polymerases also require divalent metal ions to function. Native thermophilic DNA polymerases have maximal catalytic activity at about 70° C. to about 80° C. At lower temperatures their activity is reduced. For example, at 37° C., many DNA polymerases have only about 10% of their maximal activity. DNA polymerases lacking 3′→5′ proofreading exonuclease activity have higher error rates than the polymerases with exonuclease activity. Table 6 depicts the nucleic acid and amino acid sequences of several exemplary native and/or wild-type DNA polymerases.

[0065] Taq DNA polymerase is a highly thermostable DNA polymerase of the thermophilic bacterium Thermus aquaticus. Taq DNA Polymerase catalyzes 5′=>3′ synthesis of DNA. The enzyme has no detectable 3′=>5′ proofreading exonuclease activity, and possesses low 5′=>3′ exonuclease activity. Native Taq DNA Polymerase is preferred for amplifications of bacterial DNA sequences homologous to those found in E. coli. The error rate of Taq polymerase is between about 1×10⁻⁴ to 2×10⁻⁵ errors per incorporated base.

[0066] Pfu DNA polymerases is derived from the bacterium Pyrococcus furiosus and has the lowest error rate of thermophilic DNA polymerases. Its error rate is about 1.5×10⁻⁶ per base pair. Besides that, Pfu DNA polymerase is highly thermostable and possesses 3′ to 5′ exonuclease proofreading activity that enables the polymerase to correct nucleotide-misincorporation errors.

[0067] The native 9°N DNA polymerase is purified from a strain of E. coli that carries a modified 9°N DNA Polymerase gene (see Southworth et al. (1996) Proc. Natl. Acad. Sci. USA 93:5281-5285) from the extremely thermophilic marine archaea Thermococcus species, strain 9°N-7. The archaea is isolated from a submarine thermal vent, at a depth of 2,500 meters, 9° north of the equator at the East Pacific Rise. The native 9°N DNA polymerase has 3′→5′ proofreading exonuclease activity. A 9°N DNA polymerase sequence is provided in Table 6.

[0068] The native Tli DNA polymerase (see Table 6) is derived from the hyperthermophile archaea Thermococcus litoralis. This polymerase (also referred to as Vent® DNA polymerase) is extremely thermostable and contains a 3′→5′ exonuclease activity that enhances the fidelity of replication. The extension rate of this enzyme is in the order of 1000 nucleotides per min. In addition, the synthesis by the polymerase is largely distributive, which can generate products of at least 10,000 bases. A two-amino acid substitution within the conserved exonuclease domain abolishes both double and single strand-dependent exonuclease activity, without altering kinetic parameters for polymerization on a primed single-stranded template (see Kong et al. (1993) J Biol. Chem. 25; 268(3): 1965-75).

[0069] Another extremely thermostable native DNA polymerase (also known as DeepVent® DNA polymerase) (see Table 6) is purified from a strain of E. coli that carries the Deep Vent DNA polymerase gene from Pyrococcus species GB-D (see Xu et al. (1993) Cell 75:1371-1377). The native organism is isolated from a submarine thermal vent at 2010 meters (see Jannasch et al. (1992) Appl. Environ. Microbiol. 58:3472-3481) and is able to grow at temperatures as high as 104° C.

[0070] The native KOD1 DNA polymerase (see Table 6) is derived from the archaeon Thermococcus kodakaraensis, strain KOD1. This DNA polymerase contains a 3′→5′ exonuclease activity and two in-frame intervening sequences of 1,080 bp (360 amino acids; KOD polymerase intein-1) and 1,611 bp (537 amino acids; KOD polymerase intein-2), which are located in the middle of regions conserved among eukaryotic and archaeal alpha-like DNA polymerases. The KOD1 DNA polymerase exhibits an extension rate (100 to 130 nucleotides per second) which is 5 times higher than that of Pfu DNA polymerase. Further, KOD1's processivity (persistence of sequential nucleotide polymerization) is 10 to 15 times higher than that of Pfu DNA polymerase (see Takagi et al. (1997) Appl. Environ. Microbiol. 63(11): 4504-4510).

[0071] Those of skill in the art will recognize that other DNA polymerases will represent polymerase sequences which are suitable for modification according to the methods and principles described herein. For example, E. coli Klenow polymerase and phi29 DNA polymerase (see Table 6) are two non-thermostable Family B polymerases which may be mutated to alter their kinetics of nucleotide incorporation.

### IV. The Mutant DNA Polymerases

[0072] The instant invention provides novel and active mutant DNA polymerases that possess altered kinetics for incorporating phosphate-labeled nucleotides during polymerization. Some of the mutants substantially lack exonuclease activity. As such, the mutant polymerases exhibit a faster or slower incorporation kinetics for deoxynucleotide-triphosphates (dNTPs) or phosphate-labeled deoxynucleotide-triphosphate (dNTP) during polymerization of DNA strands in comparison to native DNA polymerases, depending on the method used. In a preferred embodiment, the mutant polymerases are used for single-molecule sequencing or genotyping and exhibit incorporation kinetics that differ from the kinetics of polymerases which lack the mutations. In another preferred embodiment, the mutant DNA polymerases of the instant invention contain one or more mutation(s) (e.g., point mutations) in their polypeptide sequence. The mutant DNA polymerases are derived from wild-type polymerases or so-called native polymerases, such as those described herein.

[0073] Table 7 lists, in alternating fashion, the nucleic acid and amino acid sequences of more than 300 mutant DNA polymerases (SEQ ID NOs: 1-750) derived from a 9°N DNA polymerase, referred to herein as 9°N-A485L polymerase (SEQ ID NO: 2). 9°N-A485L polymerase is identical to the 9°N-Native polymerase (SEQ ID NO: 786) except that the native polymerase includes an alanine (“A”) residue at amino acid position 485, where the polymerase of SEQ ID NO:2 includes a leucine. The odd-numbered SEQ IDs in Table 7 are nucleic acid sequences and each nucleic acid sequence is followed immediately by the amino acid sequence of the mutant DNA polymerase it encodes. For example, the 9°N-A485L amino acid sequence encoded by SEQ ID NO: 1 is described by SEQ ID NO: 2, and includes a mutation at amino acid position 485, wherein the alanine (A) at position 485 in the native 9°N sequence has been changed to leucine (L). SEQ ID NO: 4 comprises the A=>L mutation at position 485, as well as an additional mutation at position 336, where the leucine (L) at position 336 in 9N-A485L has been changed to an arginine (R).

[0074] Some of the mutant DNA polymerase sequences provided herein comprise histidine tags for facilitating their purification. Where SEQ ID NOs. of polymerases comprising a histidine tag are referred to, the polymerase sequences are intended to include the sequence of the isolated polymerase without the histidine tags, as well as polymerases with the histidine tags attached.

[0075] Mutant polymerases can also contain inserted or deleted sequences when compared to the sequences of the polymerase(s) in the organisms from which they are derived. For example, SEQ ID NO: 56 includes the inserted sequence, REAQLSEFFPT, at position 329 of 9°N-A485L, and another insert, PIKILANSYRQRW, at position 485 of 9°N-A485L. Mutant DNA polymerases lacking exonuclease activity, such as the mutant 9N polymerases in Table 1, may contain 2 additional mutations at positions 141 and 143, wherein aspartic acid (D) and glutamic acid (E) are replaced with alanine (A).

[0076] Table 1 present a summary of the positions and identity of amino acid point mutations and inserts in over several hundred different mutant 9N DNA polymerases. The location of mutated amino acid residues in the polymerases of Table 1 are indicated by reference to the sequence of 9N-A485L, which differs from the 9°N-Native sequence at one position (A485). A change in amino acid sequence relative to 9°N-A485L is indicated in Table 1 by the appearance in a column cell of a letter corresponding to the amino acid which appears at the indicated position (residue positions relative to 9°N-A485L are indicated in the top row of each column). A dash (“−”) in a cell in Table 1 indicates that the identity of the amino acid at the position indicated in the column header is unchanged relative to the identity of the amino acid at the same or homologous position in 9N-A485L. Similarly, the amino acid positions of mutant polymerases 4-750 in Table 1 which are not set forth in the column headings are identical to those in the same or homologous positions in 9N-A485L.

[0077] DNA polymerases can be classified into families based on segmental amino acid sequence similarities (Ito et al. (1991) Nucleic Acids Research 19:4045-4057). Homologous regions can be identified within and between polymerase families using both sequence and structural alignments (Joyce et al. (1995) Journal of Bacteriology 177(22):6321-6329). Such alignments permit the identification of corresponding amino acid positions between polymerases, both within the same polymerase family and between families. A comparison and alignment of three-dimensional structures allows for the identification of structurally homologous regions across polymerase families, and can be used apart or in conjunction with sequence alignments. As an example, FIG. 1 shows an alignment of the amino acid sequence of various family B DNA polymerases suitable for modification according to the methods and principles described herein.

[0078] The mutant DNA polymerases can be derived from various native parent enzymes, including, but are not limited to, native 9°N DNA polymerase derived from Thermococcus species 9°N-7; native Tli DNA polymerase derived from Thermococcus litoralis; native DNA polymerase derived from Pyrococcus species GB-D; native KOD1 DNA polymerase derived from Thermococcus kodakaraensis; native Taq DNA polymerase derived from Thermus aquaticus; native Phi-29 polymerase derived from Bacillus subtilis phage phi-29; and polymerase I Klenow fragment derived from the bacterium Escherichia coli.

[0079] During DNA synthesis, DNA polymerase binds to a template primer and the appropriate dNTP binds with the polymerase-DNA complex. A nucleophilic attack results in phosphodiester bond formation and release of pyrophosphate (PPi). Generally, DNA binding and nucleotide binding occur rapidly. The rate-limiting step is either phosphodiester bond formation or a conformational change that precedes nucleotide incorporation. In order for nucleotides to be incorporated, it requires a dynamic interaction between the polymerase with its nucleic acid and dNTP substrates (FIG. 9). Polymerases undergo conformational changes during the DNA binding step; after the dNTP binding step and prior to chemical catalysis; after nucleotide incorporation during PPi release; and during translocation towards the new primer 3′-OH terminus (see, e.g., Patel et al. (2001) J. Mol. Biol. 308:823-837).

[0080] Polymerization involves the association of the DNA polymerase with the template primer. According to polymerase crystal structure comparisons, the thumb subdomain of the polymerase wraps around the DNA. More specifically, the thumb subdomain rotates towards the palm subdomain, and the conserved amino acid residues located within the tip of the thumb domain rotate in the opposite direction relative to the rest of the thumb such that the tip is in proximity to the DNA. These changes result in an approximately 30 angstrom (Å) wide cylinder that almost completely engulfs the DNA and the conserved amino acid residues within the tip of the thumb subdomain grip the DNA along the minor groove. The polymerase interacts primarily with the sugar-phosphate DNA backbone along the minor groove. These interactions are associated with bending of the DNA such that it adopts an S-shaped conformation. Another conformation change occurs during dNTP binding, wherein three steps are important to achieve the “induced-fit” model for nucleotide incorporation. In the first step, structural elements within the finger domain rotate toward the 3′ primer terminus, resulting in a “closed” structure. In the second step, the template base rotates back into the helix axis by greater than or equal to 90°. In the third step, the base portion of the incoming nucleotide forms a Watson-Crick base-pair with the template base, and the triphosphate portion forms metal-mediated ionic interactions with amino acid residues of the active site. The induced-fit model for nucleotide incorporation can explain how the following three interactions with the incoming nucleotides are formed during dNTP binding, namely, there is hydrogen bonding with the template base; there are stacking interactions with planar ringed amino acid residues; and there are electrostatic interactions with negatively charged phosphate groups and charged side-chains. Thus, the induced fit model appears to allow establishment of stacking interactions and also appears to serve to bring the dNTP α-phosphate close to the primer 3′-OH group, thereby promoting metal-catalyzed transfer of a nucleotide monophosphate from the dNTP to the 3′-end of the primer strand. This induced-fit mechanism for nucleotide selection also appears to restrict conformations and structures of the incoming nucleotides, promoting efficient and correct nucleotide incorporation (Patel et al., supra).

### V. A Mutant DNA Polymerase Assay

[0081] An assay system has been established for identifying the mutant DNA polymerases of the instant invention. For example, a candidate mutant DNA polymerase can be tested in a primer extension assay to determine the nucleotide incorporation rate of the mutant polymerase. Briefly, this system utilizes an oligonucleotide template, a 5′-fluorescent dye labeled oligonucleotide primer, and γ-phosphate PEG-labeled dNTPs. A mutant DNA polymerase is added to the reaction mixture and the sample is incubated at 74° C. for a fixed time (e.g., 30 sec). The reaction is stopped by adding EDTA and the average number of bases added to the primer is determined by quantifying bands on a fluorescence-based electrophoresis instrument (e.g., LI-COR 4200). This analysis provides the average nucleotide incorporation rate (nt/sec). Kinetic constants are determined by measuring incorporation rate as a function of nucleotide concentration as previously described (Kong, H. et al., J. Biol. Chem., 268(3): 1965-75 (1993)). An alternative primer extension assay, especially useful for high-throughput screening, is also disclosed herein. Mutant DNA polymerases that extend the primer faster than the native parent polymerases are selected.

[0082] Another system useful for testing DNA polymerase properties and kinetics is disclosed in U.S. Pat. No. 5,352,778, which describes an assay wherein polymerase activity is measured by the incorporation of radioactively labeled deoxynucleotides into DNAse-treated-, or activated DNA. Following subsequent separation of the unincorporated deoxynucleotides from the DNA substrate, polymerase activity is proportional to the amount of radioactivity in the acid-insoluble fraction comprising the DNA (for a detailed description see also Lehman et al. (1958) J. Biol. Chem., 233:163).

### VI. Overview of Electrokinetic Sequencing

[0083] Nanoparticle Nucleotides. The mutant DNA polymerases of the instant invention can be used in electrokinetic sequencing which, in one embodiment, is based on a nucleotide configuration in which nucleotide triphosphates (NTPs) such as deoxyribonucleotide triphosphates (dNTPs) are attached to nanoparticles by a linker (FIG. 2). In one embodiment, the γ-phosphate group of the NTP can be tethered via a free-jointed linker to the surface of the nanoparticle. In a preferred embodiment, the free-jointed linker is a polyethylene glycol (PEG) linker. In certain instances, up to about 100 NTPs (e.g., dNTPs) cover the surface of a nanoparticle (e.g., 55 nm particle). Exceptionally bright fluorescence from these nanoparticles enables a charged-couple device (CCD) camera to image from about 200-300 single DNA molecules simultaneously with millisecond exposure times. In addition to improved detectability, the nanoparticles are also capable of carrying a substantial electric charge. Both characteristics, i.e., strong fluorescence and electric charge, are elements of electrokinetic sequencing methods.

[0084] Electrokinetic Cycle. In certain aspects, electrokinetic sequencing methods of the present invention comprises cycled transport of nanoparticle nucleotides between a bottom electrode and a top electrode (FIG. 2). In one embodiment, the bottom electrode is the glass bottom of a microtiter well coated with electrically-conductive, optically-transparent indium-tin oxide (ITO). About 200-300 single, individual, optically resolved polymerase-DNA complexes are immobilized in the field of view at random positions on the bottom of the well, such that the majority of complexes are optically resolvable from their nearest neighbors. This allows about 200-300 different molecules to be sequenced simultaneously by imaging a 100 μm field with a CCD camera.

[0085] In certain preferred aspects, the sequencing cycle comprises a wave of particles, which is cycled between electrodes by an alternating electric field (E-field). First, particles are concentrated in a monolayer at the bottom electrode to blanket the immobilized polymerase-DNA complexes. This allows polymerases to bind the correct nucleotides for incorporation into DNA. Next, the E-field is reversed to transport unbound particles away from the surface, leaving only particles retained by the polymerases. With unbound particles now cleared from the surface (e.g., an 800 nm distance is sufficient), retained particles are imaged by evanescent wave excitation with millisecond time resolution while the catalytic reaction is in progress. Images are acquired before the catalytic reaction is completed because, after incorporation of the nucleotide into DNA, pyrophosphate and the attached nanoparticle are released from the enzyme. This completes one sequencing cycle. The timing of E-field switching and image acquisition is dictated by the duration of the catalytic cycle, and is expected to range from about 1-100 msec (Levene et al., Science, 299:682 (2003)).

[0086] Throughput. In one embodiment, when the electrokinetic cycle operates at 10 cycles/sec (i.e., 100 msec period), the maximum possible sequencing speed (or catalytic rate) is 10 bases per second. At this speed, a 20 kb DNA molecule can be sequenced in 33 min with any mutant DNA polymerase of the instant invention. In addition, net throughput can be significantly enhanced by multiplexing. For example, with an average of one polymerase-DNA complex per 50 μm² area, there are about 200 optically-resolved complexes in the optical field (100×100 μm) in the bottom of the microtiter well. In this embodiment, each well is used only once for a period of 33 min. to simultaneously sequence all 200 20 kb DNA molecules (i.e., 4 million bases total). Then, the next 4 million bases can be sequenced in a new well, and so on. Although it would take about 30-40 days to process one 1536 well plate, one well at a time, the plate can be processed 4 times faster (i.e., in 7-10 days) by quadruplexing the instrument optics. Under these conditions, a 1536 well microtiter plate can produce the equivalent of 2 human genomes worth of sequence (i.e., 4 million bases/well×1536 wells=6.1 billion bases total).

### VII. Methods for Long-Read Single Molecule Sequencing

[0087] Methods for long-read sequencing that employ the mutant DNA polymerases of the instant invention generally fall into two categories, depending on whether fluorescence or electrical detection is used. Fluorescence methods monitor either nucleotide addition by polymerase or exonucleolytic hydrolysis of prelabeled DNA. Polymerase long-read methods use phosphate-labeled nucleotides that are released after base incorporation.

[0088] Electrokinetic sequencing is an example of a single molecule sequencing method. This method utilizes dNTPs modified with a dye label on the phosphate. The labeled phosphate released after base addition allows the label to be detected before, during or after separation from unused nucleotides in a microfluidics system.

[0089] The use of 50 nm zero-mode waveguides (i.e., 50 nm diameter apertures in a metal film) for near-field detection of phosphate-labeled nucleotides bound to mutant polymerases of the instant invention during the catalytic cycle is another example of a single molecule sequencing method (see also Levene et al., Science, 299:682 (2003)). The waveguide allows the enzyme to be detected in a small volume without interference from labeled nucleotides in bulk solution. High-throughput sequencing (i.e., imaging of 200-300 polymerases simultaneously with a CCD camera) is advantageously provided by the electrokinetic sequencing methods described herein.

[0090] A third method for single molecule sequencing involves labeling the mutant DNA polymerase with a fluorophore and detecting modulation of the fluorescence signal by fluorescence resonance energy transfer (FRET) as phosphate-labeled nucleotides, labeled with quenchers or other fluorophores, transiently bind to the enzyme. Background signal from nucleotides in the bulk medium is reduced by detecting modulation of the enzyme fluorescence, instead of directly detecting the nucleotide label. Herein, the polymerase is exposed to continuous illumination.

[0091] Non-fluorescent sequencing methods propose to detect electric signals from individual bases as a DNA strand traverses through a nanopore (Deamer et al., Acc. Chem. Res., 35:817 (2002)) and can be employed with the mutant DNA polymerases of the instant invention.

[0092] The electrokinetic sequencing method that employs the mutant DNA polymerases of the present invention overcomes the limitations and challenges of other single molecule sequencing methods. In addition, the mutant DNA polymerases, such as those described in Tables 1-3 which exhibit increased rates of phosphate labeled nucleotide incorporation, are suitable for use in the immobilized polymerase-DNA complexes described herein. As such, electrokinetic sequencing provides long-read high-throughput sequencing with sufficient resolution and without the need to label the polymerase.

### VIII. Topologically Linked Polymerase-DNA Complexes

[0093] In a preferred embodiment, the polymerase-DNA complexes are taught and described in U.S. Patent Publication No. 2005/0042633, published Feb. 24, 2005, and incorporated herein by reference. As described therein, a polymerase-nucleic acid complex (PNAC), comprises: a target nucleic acid and a nucleic acid polymerase, wherein the polymerase has an attachment complex comprising at least one anchor, which at least one anchor irreversibly associates the target nucleic acid with the polymerase to increase the processivity index. As used herein, the term “processivity index” means the number of nucleotides incorporated before the polymerase dissociates from the DNA. Processivity refers to the ability of the enzyme to catalyze many different reactions without releasing its substrate. That is, the number of phosphodiester bonds formed is greatly increased as the substrate is associated with polymerase via an anchor.

[0094] In a preferred embodiment, the polymerase is attached to the ITO permeation layer and stably associated with a DNA template to achieve long sequence reads. The polymerase can be attached to the ITO permeation layer via various linkages including, but not limited to, covalent, ionic, hydrogen bonding, Van der Waals' forces, and mechanical bonding. Preferably, the linkage is a strong non-covalent interaction (e.g. avidin-biotin) or is covalent. In order to permanently associate the DNA template and the polymerase to the ITO permeation layer, an approach that functionally mimics the sliding clamp of a replisome, as described in Shamoo et al., Cell, 99:155 (1999), can be used.

[0095] As shown in FIG. 3, the polymerase-DNA complex is covalently attached (i.e., anchored) to the ITO permeation layer through two linkers in order to irreversibly capture the DNA while still allowing it to slide through the polymerase active site. Circular in form, the DNA (˜20 kb) is topologically linked to the immobilized polymerase, and therefore does not dissociate.

[0096] The methods of the present invention employ a mutant DNA polymerase such as a mutant DNA polymerase I, II, or III. Preferably, the methods employ a mutant DNA polymerase derived from family B polymerases. Suitable family B polymerases include, but are not limited to, a 9°N DNA polymerase derived from Thermococcus species 9°N-7; a Tli DNA polymerase derived from Thermococcus litoralis; a DNA polymerase derived from Pyrococcus species GB-D; a KOD1 DNA polymerase derived from Thermococcus kodakaraensis; a Taq DNA polymerase derived from Thermus aquaticus; a Phi-29 polymerase derived from Bacillus subtilis phage phi-29; and a polymerase I Klenow fragment derived from the bacterium Escherichia coli. Specific examples include, but are not limited to, any of the mutant DNA polymerases set forth in SEQ ID NO: 4 through SEQ ID NO: 750 (9°N mutants), SEQ ID 754-764 (Klenow mutants) or SEQ ID NO: 767 through SEQ ID NO: 784. Those of skill in the art will know of other enzymes or polymerases suitable for use in the present invention.

[0097] Examples of modified DNA polymerases that can be used with the methods of the instant invention are mutants derived from 9N-A485L (SEQ ID NO: 2; commercially available as Therminator™ (New England Biolabs, Inc)), including those listed in Table 1. The protein regions on either side of the DNA binding cleft of 9N-A485L, likely to be conformationally rigid, were identified based upon previous studies with RB69 polymerase. Loops of ten amino acids containing a 6×His sequence at five candidate positions were inserted. Loops inserted at positions K53 and K229 of 9N-A485L (modeled in FIG. 4) had no measurable effect on polymerase activity when present either individually or combined, and both were capable of binding Ni-NTA beads in an affinity purification procedure. Based upon previous studies on active immobilized polymerases and other enzymes, e.g., unoriented T7 DNA polymerase (Levene et al., Science, 299:682 (2003)), oriented EcoRI (Bircakova et al., J. Mol. Recognit., 9:683 (1996)), and solid-phase enzymes used in bioprocess engineering (Berg et al., In “Interfacial Enzyme Kinetics,” John Wiley & Sons (2002)), the engineered polymerase is expected to display activity on a surface. Alternatively, non-covalent bonding is employed for attaching the polymerase via the 6×His loops to a Ni-NTA-activated permeation layer.

[0098] Suitable covalent coupling methods include, without limitation, a maleimide or thiol-activated permeation layer coupled to specific cysteine amino acids on the polymerase surface, a carboxylate permeation layer coupled to specific lysine amino acids on the polymerase surface, a hydrazine permeation layer coupled to the unnatural amino acid p-acetyl-L-phenylalanine on the polymerase surface, and the like. The latter is particularly interesting because of its high coupling specificity, long reactant shelf life, and imminent commercialization (Wang et al., PNAS, 100:56 (2003)). Given a suitable coupling chemistry, complexes can be formed by mixing the 9N-A485L polymerase with primed circular DNA and driving them electrically to the electrode surface for covalent coupling. To ensure that most anchored 9N-A485L proteins are associated with template, DNA is used at concentrations exceeding the binding constant (K_{mDNA}=50 pM for 9N; New England Biolabs Catalog). Polymerases anchored without DNA are neglected because they have no sequencing activity. When polymerase attachment is complete, the electric field is reversed to elute linear (e.g., broken) DNA templates, such that the only anchored polymerases capable of generating sequence data are those complexed with circular DNA templates. A simple computer model indicates that 200-300 polymerase-DNA complexes can be dispersed randomly in a 100 μm field of view at optically resolvable distances. The number of resolvable complexes decreases at higher densities because of overcrowding. Random dispersion on an inexpensive ITO surface provides an easy way to isolate single molecules for multiplexed, long-read sequence analysis. In another embodiment, polymerases are allowed to bind non-specifically to the ITO surface, rather than binding by specific anchors. Some of the polymerases will bind in an inactive orientation, and others will bind in an active orientation. Particularly, only those bound in an active orientation will produce signals from the sequencing reaction, while those bound in an inactive orientation will not produce signals and will therefore be undetectable.

### IX. Examples

[0099] The following examples are offered to illustrate, but not to limit, the claimed invention.

### Example 1

### Library Screening Method

[0100] This example illustrates the screening of a mutant DNA polymerase library. The cDNA library was constructed by cloning genes of DNA polymerases (i.e., 9N-A485L DNA polymerase (SEQ ID NO: 2) and 9°N-Native DNA polymerase) into expression plasmids. The polymerase genes were mutated at specific nucleotide positions to create the mutant DNA polymerases (see Table 1 and the sequences of Table 7). A primer extension assay was used to estimate the polymerase activity of the various mutants that were generated.

[0101] Library Construction. Therminator™ DNA polymerase (i.e., 9N-A485L; SEQ ID NO: 2) and 9°N-Native DNA polymerase genes were obtained from New England Biolabs. The genes were cloned into an arabinose-inducible expression plasmid (pBAD, Invitrogen). Mutations were introduced at specific nucleotide positions using the QuikChange™ site-directed mutagenesis kit according to the manufacturer's instructions (Stratagene). Preferably, all three nucleotides of a target codon were randomized using a single degenerate oligonucleotide in order to generate the mutant DNA polymerase library containing all 20 amino acids at that position. Multiple codons were randomized using multiple degenerate oligonucleotides targeting multiple sites in a single mutagenesis reaction (Stratagene), or by randomizing a second position starting from a library already randomized at a first position.

[0102] Protein Expression And Extraction. Single colonies of library clones were grown overnight in 96-well plates containing 100 μl of growth medium per well. The clones were subcultured by diluting (overnight) cultures 100-fold into a fresh culture plate containing 100 μl of growth medium supplemented with 0.04% arabinose to induce protein expression. After 4 hour growth at 37° C., 20 μl of lysis solution (10 mM Tris Cl pH 8, 0.8% IGEPAL) was added to each well, the plate was sealed with foil and heated at 75° C. for 10 min. Cell lysates were stored at 4° C. for up to 2 weeks with little loss of thermophilic polymerase activity.

[0103] Polymerase Assay. A primer extension assay was used to estimate polymerase activity. The primer is 5′-labeled with a fluorophore (e.g., FAM), and the template is 3′-labeled with a quencher (e.g., Black Hole Quencher I, Biosearch Technologies). Primer extension by polymerase was estimated by melt-curve analysis of the template-primer duplex using a real-time PCR instrument (Opticon I, MJ Research). The fluorescence signal increased as the duplex melted and the fluorescent primer strand separated from the template strand. As the primer is extended by polymerase, the Tₘ increases. Reactions were performed in duplicate, with one sample (96-well plate) containing unlabeled nucleotides and the other PEG-labeled nucleotides. Each mutant was scored by taking the ratio of activity between unlabeled and PEG-labeled nucleotides, in order to normalize for variation in the amount of polymerase in each well. Mutants showing a higher ratio of activity with PEG-labeled in comparison to unlabeled nucleotides were selected for further characterization. Alternatively, if the protein amounts were sufficiently uniform from sample to sample, improved mutants were selected based on their activity with PEG-labeled nucleotides alone.

[0104] Reactions contained 0.1-5.0 μl cell lysate, 0.2% NP-40 (contributed by cell lysate and supplemented as necessary, depending on lysate volume), 20 mM Tris-Cl pH 9.2, 50 mM KCl, 5 mM MgSO₄, 150 nM template (5′-CGGCTGCCTGGCGCGTCGGAGTGCTCA), 100 nM primer (5′-FAM-TGAGCACTCCGACGCGCCA), and either unlabeled nucleotides or PEG-labeled nucleotides. A chemically synthesized “full length” primer (5′-FAM-TGAGCACTCCGACGCGCCAGGCAGCCG) is utilized in a control sample as explained below. Preferably, unlabeled nucleotides were used at 1 μM each, and PEG-labeled nucleotides were at 200 μM each; a mixture of all four nucleotides A, C, G and T was used in each reaction mix. The preferred incubation temperature was 68° C. and the preferred incubation time is 1-30 min. To capture mutant polymerases with low temperature activity a two stage incubation was performed (i.e., 40 C then 68 C). After incubation, melting data was acquired at 1° C. intervals from 65° C. to 90° C. Reaction conditions (i.e., lysate amount, nucleotide concentration, incubation temperature, incubation time) were adjusted so that the primer was partly extended, allowing detection of either increased (long extension) or decreased (short extension) activity of each tested polymerase mutant.

[0105] Analysis. Melt curves are analyzed by a software program (written in the LabVIEW G programming language, National Instruments Inc.) as follows. The raw data comprises fluorescence F at each temperature T from 65° C. to 90° C. The F values are smoothed with the standard LabVIEW median filter (window parameter=2) and the first derivative dF/dT is taken at each temperature point T along the curve. The same median filter is applied to the dF/dT values, and the resulting smoothed dF/dT values are rescaled between 0-1 such that the minimum dF/dT value is 0.0 and the maximum 1.0, with all other values in between. The rescaled (0-1) dF/dT values (at each temperature T) are summed over two user-defined temperature ranges: for example, a low temperature range 68 C to 77 C (lowRangeSum) and a high temperature range 78 C to 85 C (highRangeSum). The obtained lowRangeSum and highRangeSum values are normalized such that
lowRangeSum+highRangeSum=1.
The raw score for polymerase activity is given by
rawScore=highRangeSum−lowRangeSum
where rawScore ranges −1 to +1 (the −1 extreme if lowRangeSum=1 and highRangeSum=0; and the +1 extreme if lowRangeSum=0 and highRangeSum=1).

[0106] The rawScore data for all samples is normalized between two control samples run in the same sample set as the mutant polymerases. Both controls utilize E. coli lysates from cells that express no thermostable polymerase activity. The “unextended” control contains the same primer used in the test samples, but the primer remains unextended because there is no active polymerase. The “full extension” control contains the “full length” primer sequence defined above. Each rawScore is normalized between the controls as
activityScore=(rawScore_{—}i−noExt)/(fullExt−noExt),
where activityScore is the normalized score, rawScore_i is the rawScore for the i^{th} sample, noExt is the rawScore of the unextended control, and fullExt is the rawScore of the full extension control. The activityScore values are used to rank mutant polymerases relative to their respective parent polymerase in order to identify mutant polymerases with improved activity.

[0107] The activityScore as defined above is a highly reproducible way to rank polymerase activity. Alternative methods include, for example, determining the melting temperature from F vs T data or dF/dT vs T data (Wittwer C T, Reed G H, Gundry C N, Vandersteen J G, Pryor R J (2003) Clinical Chemistry 49: 853-860).

[0108] Results. Mutant polymerases selected from different libraries were compared on a single 96-well assay plate using 9N-A485L as a control. Scores were determined for PEG-labeled nucleotides only, without comparison to unlabeled nucleotides. The activityScore of each mutant were given relative to a control polymerease, e.g., 9N-A485L, where the activityScore of 9N-A485L has been normalized to 1.0. A relative score >1.0 indicates=d an improvement over the 9N-A485L with respect to the utilization of PEG-labeled nucleotides, while a relative score <1.0 indicated reduced activity. Corresponding rates of phosphate-labeled nucleotide incorporation were determined and the mutant 9N polymerases were sorted according to their activities relative to 9N-485L (SEQ ID NO. 2). The results are compiled in Table 1. An asterix (“*”) in the score column in Table 1 means that the relative rate of nucleotide incorporation by the mutant DNA polymerase versus 9N-485L is 0.99 or less; a “+” means that the relative rate is between 1 and 2.99; a “++” means the relative rate is between 3 and 6.99; and a “+++” means the relative rate as measured by the assay (see Example 1) is between 7 and 23 times faster.

[0109] Similar protocols were used to prepare and study phosphate region mutants of Taq DNA polymerase and Klenow DNA polymerase. Taq DNA polymerase mutants with improved rates of phosphate-labeled nucleotide incorporation are shown in Table 2, and Klenow DNA polymerase mutants with improved rates of phosphate-labeled nucleotide incorporation are shown in Table 3.

TABLE 2
Summary of Mutant Klenow DNA Polymerases

| Relative | | | | | | | | |
|---|---|---|---|---|---|---|---|---|
| Score | | 589 | 617 | 645 | 691 | 693 | 726 | nt/min |
| 1.0000 | SEQ ID NO: 766 | G | V | I | R | A | R | 1.12 |
| | Klenow | | | | | | | |
| | Polymerase Parent | | | | | | | |
| 2.2142 | SEQ ID NO: 768 | — | — | — | Y | — | — | 2.4675 |
| 2.0747 | SEQ ID NO: 770 | — | — | — | — | G | — | 2.625 |
| 2.9549 | SEQ ID NO: 772 | — | — | — | — | — | S | 1.6225 |
| 3.0248 | SEQ ID NO: 774 | D | — | H | — | — | — | 11.475 |
| 3.0393 | SEQ ID NO: 776 | — | — | F | — | — | — | 10.65 |
| 2.9283 | SEQ ID NO: 778 | — | — | H | — | — | — | 11.225 |
| 2.9905 | SEQ ID NO: 780 | — | — | K | — | — | — | 10.4 |
| 2.9660 | SEQ ID NO: 782 | — | I | — | — | — | — | 1.5275 |
| 3.1200 | SEQ ID NO: 784 | — | — | W | — | — | — | 14.725 |

[0110] TABLE 3
Summary of Mutant Taq DNA Polymerases

| Relative | | | | | | | |
|---|---|---|---|---|---|---|---|
| Score | | 395 | 423 | 469 | 471 | 504 | nt/min |
| 1.0000 | SEQ ID NO: 752 | V | I | R | A | L | 0.8414 |
| | Taq Polymerase | | | | | | |
| | Parent | | | | | | |
| 0.9705 | SEQ ID NO: 754 | C | — | — | — | — | 0.7657 |
| 1.2910 | SEQ ID NO: 756 | — | K | — | — | — | 3.6286 |
| 1.3193 | SEQ ID NO: 758 | — | E | — | — | — | 1.1457 |
| 1.1427 | SEQ ID NO: 760 | — | — | I | — | — | 0.7571 |
| 0.9403 | SEQ ID NO: 762 | — | — | — | S | — | 0.7286 |
| 1.0559 | SEQ ID NO: 764 | — | — | — | — | G | 1.2029 |

### Example 2

### Gel Extension Assay of Mutant Polymerase Activity

[0111] A gel extension assay using saturating amounts of selected purified mutant DNA polymerases was used to analyze their activity. Each enzyme was incubated at 68° C. for 30 seconds with an IRDye700 labeled primer hybridized to ssM13mp18 and saturating amounts of phosphate-labeled nucleotides. Reactions were resolved on a 10% TBE-Urea gel using a LI-COR 4200 DNA Analyzer. The average rate (nucleotides per second) for each of the indicated enzymes was calculated. The results are shown in FIGS. 10 and 11.

### Example 3

### Defining Phosphate Regions of DNA Polymerases

[0112] Taq DNA polymerase (Family A). Taq DNA polymerase was analyzed using public-domain software (Swiss-PDB Viewer version 3.7, http://ca.expasy.org/spdbv/). Initially, the protein (1QTM.pdb; Berman et al., Nucleic Acids Res, 28:235 (2000)) was divided into 2 regions by a plane parallel to the two paired bases in the active site (i.e., parallel to the aromatic ring moieties of both the bound dTTP and of the templating adenosine). This was accomplished in “slab” view (slab depth 100 A), by both rotating the model and translating the slab until the two bases were co-planar with the slab. The model was oriented with the phosphate groups of dTTP pointed into the display screen. The slab was then translated further into the screen to hide from view both bases as well as the alpha and beta phosphates of dTTP, so that only the gamma phosphate and amino acids between the gamma phosphate and the protein surface were visible. Then, the set of visible amino acids was further narrowed by selecting only amino acids within 15 Å of the dTTP. Secondary structure elements containing amino acids of the narrowed set define the phosphate region of Taq DNA polymerase (Table 5).

[0113] 9°N polymerase (Family B). The published structure of 9°N polymerase (1QHT.pdb) does not contain bound dNTP or template DNA. These two elements were therefore modeled into 9°N holoenzyme by structural alignment with RB69 DNA polymerase (1IG9.pdb), using the structurally conserved palm domain as described for aligning polymerases eta and T7 (Trincao et al., Mol Cell, 8:417 (2001)). Four structurally conserved beta strands in the two palm domains were visually identified and aligned between RB69 (Y619-V627, G700-T703, R707-V712, K724-K726) and 9°N (Y538-A546, G586-V589, K592-I597, T604-R606) using Swiss-PDB Viewer version 3.7 (http://ca.expasy.org/spdbv/). The structures were then superimposed using the function, “Fit molecules (from selection),” giving an RMS deviation of 2.49 Å for 22 aligned alpha carbon atoms. All of the amino acids of 9°N, plus the DNA and dTTP groups from RB69, were merged into a single pdb file using the function “Create merged layer from selection” (see FIG. 12). The phosphate region was defined as explained in this Example with respect to Taq polymerase (Table 5).

[0114] Phosphate regions of polymerase beta, eta and HIV-RT (Families X, Y and RT). Published structures of polymerases beta (2BPF.pdb) and HIV-RT (1RTD.pdb) contain bound dNTP and template DNA, enabling both to be analyzed as Taq and 9°N DNA polymerase were analyzed. Their phosphate regions are given in Table 5. Polymerase eta (1JIH.pdb) was merged with template and dNTP from T7 DNA polymerase (1T7P.pdb) using the conserved palm domains provided in (Trincao et al., (2001)) for this structural alignment. The phosphate region of polymerase eta is given in Table 5.

[0115] All publications and patent applications cited in this specification are herein incorporated by reference as if each individual publication or patent application were specifically and individually indicated to be incorporated by reference. Although the foregoing invention has been described in some detail by way of illustration and example for purposes of clarity of understanding, it will be readily apparent to those of ordinary skill in the art in light of the teachings of this invention that certain changes and modifications may be made thereto without departing from the spirit or scope of the appended claims.

LENGTHY TABLE REFERENCED HERE
US20070048748A1-20070301-T00001
Please refer to the end of the specification for access instructions.

LENGTHY TABLE REFERENCED HERE
US20070048748A1-20070301-T00002
Please refer to the end of the specification for access instructions.

LENGTHY TABLE REFERENCED HERE
US20070048748A1-20070301-T00003
Please refer to the end of the specification for access instructions.

LENGTHY TABLE REFERENCED HERE
US20070048748A1-20070301-T00004
Please refer to the end of the specification for access instructions.

LENGTHY TABLE REFERENCED HERE
US20070048748A1-20070301-T00005
Please refer to the end of the specification for access instructions.

LENGTHY TABLE
The patent application contains a lengthy table section. A copy of the table is available in electronic form from the USPTO web site (http://seqdata.uspto.gov/?pageRequest=docDetail&DocID=US20070048748A1). An electronic copy of the table will also be available from the USPTO upon request and payment of the fee set forth in 37 CFR 1.19(b)(3).

The application's sequence listing, which the Patent Office published only in electronic form, follows.

SEQUENCE LISTING (886 sequences)

SEQ ID NO: 1 - DNA, 2409 bp, Artificial Sequence
  Description of Artificial Sequence:Thermococcus species 9degreesN-7 mutant DNA polymerase 9degreesN-A485L, Therminator DNA polymerase
atgattctcgataccgactacatcaccgagaacgggaagcccgtgataagggtcttcaagaaggagaacggcgagtttaaaatcgagtacgacagaaccttcgagccctacttctacgcccttctgaaggacgattctgcgatagaggacgtcaagaaggtaaccgcaaagaggcacggaacggttgtcaaggtgaagcgcgccgagaaggtgcagaagaagttcctcggcaggccgatagaggtctggaagctctacttcaaccatcctcaggacgtcccggcgattcgagacaggatacgcgcccaccccgctgtcgttgacatctacgagtacgacatacccttcgccaagcgctacctcatcgacaagggcctgattccgatggagggcgacgaggagcttacgatgctcgccttcgcgatcgcaaccctctatcacgagggcgaggagttcggaaccgggccgattctcatgataagctacgccgacgggagcgaggcgagggtgataacctggaagaagattgaccttccgtacgttgacgtcgtctcgaccgagaaggagatgattaagcgcttcctccgcgtcgtcagggagaaggaccccgacgtgctcatcacctacaacggcgacaacttcgacttcgcctacctgaagaagcgctgtgaggaactcggaataaagttcacactcggcagggacgggagcgagccgaagatacagcgaatgggcgaccgctttgccgttgaggtgaagggcaggattcacttcgacctctaccccgtcataaggcgcacgataaacctcccgacctacacccttgaggccgtttacgaggccgtctttggaaagcccaaggagaaggtttacgcagaggagatagcgcaggcctgggagagcggggagggccttgaaagggttgcaagatactcgatggaggacgctaaggtgacctacgagctgggaagggagttcttcccgatggaggcccagctttcgaggcttataggccagagcctctgggacgtctcgcgctcgagcaccggaaatttggtggagtggttcctcctgcggaaggcctacaagaggaacgagctcgccccaaacaagcccgacgagagggagctcgcgagacggcgcgggggctacgctggcgggtacgttaaggaaccagagcggggattgtgggacaacattgtgtatttagacttccgctcgctgtatccttcaatcatcataacccacaacgtctcgccggataccctcaaccgcgagggctgtaaagagtacgacgtcgcccctgaggttggacacaagttctgcaaggacttccccggcttcataccaagcctcctgggagatttgctcgaggagaggcagaagataaagcggaagatgaaggcaacggttgacccgctggagaagaaactcctcgattacaggcagaggcttataaaaatcctcgccaacagcttctacggctactacggctacgccaaggcccggtggtactgcaaggagtgcgccgagagcgttacggcctggggaagggagtatatagaaatggttatccgggaactcgaagaaaaattcggttttaaagttctctatgccgatacagacggtctccatgctaccattcccggagcagacgctgaaacagtcaagaaaaaagcaaaggagttcttaaaatacattaatccaaaactgcccggcctgctcgaacttgagtacgagggcttctacgtgaggggcttcttcgtcacgaagaagaagtacgctgtgatagacgaggagggcaagataaccacgaggggtcttgagattgtgaggcgcgactggagcgagatagcgaaggagacccaggccagggtcttagaggcgatactcaagcacggtgacgtcgaggaggccgttaggatagtcaaggaagtgacggaaaagctgagcaagtatgaggtcccgcccgagaagctggtaatccacgagcagataacgcgcgatttgagggattacaaagccaccggcccgcacgttgccgttgcgaagaggctcgcggcgcgtggagtgaaaatccggcccggcacggtgataagctacatcgtcctaaagggctctggaaggataggcgacagggcgattccagctgatgagttcgacccgacgaagcaccgctacgatgcggaatactacatcgagaaccaggttctcccggcggtggagaggattctaaaagccttcggctatcggaaggaggatttgcgctaccagaagacgaagcaggtcggctcgggcgcgtggctgaaggtgaaggggaagaagggtaccgaagcttacgtagaacaaaaactcatctcagaagaggatctgaatagcgccgtcgaccatcatcatcatcatcattga

SEQ ID NO: 2 - protein, 802 aa, Artificial Sequence
  Description of Artificial Sequence:Thermococcus species 9degreesN-7 mutant DNA polymerase 9degreesN-A485L, Therminator DNA polymerase
MILDTDYITENGKPVIRVFKKENGEFKIEYDRTFEPYFYALLKDDSAIEDVKKVTAKRHGTVVKVKRAEKVQKKFLGRPIEVWKLYFNHPQDVPAIRDRIRAHPAVVDIYEYDIPFAKRYLIDKGLIPMEGDEELTMLAFAIATLYHEGEEFGTGPILMISYADGSEARVITWKKIDLPYVDVVSTEKEMIKRFLRVVREKDPDVLITYNGDNFDFAYLKKRCEELGIKFTLGRDGSEPKIQRMGDRFAVEVKGRIHFDLYPVIRRTINLPTYTLEAVYEAVFGKPKEKVYAEEIAQAWESGEGLERVARYSMEDAKVTYELGREFFPMEAQLSRLIGQSLWDVSRSSTGNLVEWFLLRKAYKRNELAPNKPDERELARRRGGYAGGYVKEPERGLWDNIVYLDFRSLYPSIIITHNVSPDTLNREGCKEYDVAPEVGHKFCKDFPGFIPSLLGDLLEERQKIKRKMKATVDPLEKKLLDYRQRLIKILANSFYGYYGYAKARWYCKECAESVTAWGREYIEMVIRELEEKFGFKVLYADTDGLHATIPGADAETVKKKAKEFLKYINPKLPGLLELEYEGFYVRGFFVTKKKYAVIDEEGKITTRGLEIVRRDWSEIAKETQARVLEAILKHGDVEEAVRIVKEVTEKLSKYEVPPEKLVIHEQITRDLRDYKATGPHVAVAKRLAARGVKIRPGTVISYIVLKGSGRIGDRAIPADEFDPTKHRYDAEYYIENQVLPAVERILKAFGYRKEDLRYQKTKQVGSGAWLKVKGKKGTEAYVEQKLISEEDLNSAVDHHHHHH

SEQ ID NO: 3 - DNA, 2409 bp, Artificial Sequence
  Description of Artificial Sequence:Thermococcus species 9degreesN-7 mutant DNA polymerase, 9degreesN mutant
atgattctcgataccgactacatcaccgagaacgggaagcccgtgataagggtcttcaagaaggagaacggcgagtttaaaatcgagtacgacagaaccttcgagccctacttctacgcccttctgaaggacgattctgcgatagaggacgtcaagaaggtaaccgcaaagaggcacggaacggttgtcaaggtgaagcgcgccgagaaggtgcagaagaagttcctcggcaggccgatagaggtctggaagctctacttcaaccatcctcaggacgtcccggcgattcgagacaggatacgcgcccaccccgctgtcgttgacatctacgagtacgacatacccttcgccaagcgctacctcatcgacaagggcctgattccgatggagggcgacgaggagcttacgatgctcgccttcgcgatcgcaaccctctatcacgagggcgaggagttcggaaccgggccgattctcatgataagctacgccgacgggagcgaggcgagggtgataacctggaagaagattgaccttccgtacgttgacgtcgtctcgaccgagaaggagatgattaagcgcttcctccgcgtcgtcagggagaaggaccccgacgtgctcatcacctacaacggcgacaacttcgacttcgcctacctgaagaagcgctgtgaggaactcggaataaagttcacactcggcagggacgggagcgagccgaagatacagcgaatgggcgaccgctttgccgttgaggtgaagggcaggattcacttcgacctctaccccgtcataaggcgcacgataaacctcccgacctacacccttgaggccgtttacgaggccgtctttggaaagcccaaggagaaggtttacgcagaggagatagcgcaggcctgggagagcggggagggccttgaaagggttgcaagatactcgatggaggacgctaaggtgacctacgagctgggaagggagttcttcccgatggaggcccaactttcgaggagaataggccagagcctctgggacgtctcgcgctcgagcaccggaaatttggtggagtggttcctcctgcggaaggcctacaagaggaacgagctcgccccaaacaagcccgacgagagggagctcgcgagacggcgcgggggctacgctggcgggtacgttaaggaaccagagcggggattgtgggacaacattgtgtatttagacttccgctcgctgtatccttcaatcatcataacccacaacgtctcgccggataccctcaaccgcgagggctgtaaagagtacgacgtcgcccctgaggttggacacaagttctgcaaggacttccccggcttcataccaagcctcctgggagatttgctcgaggagaggcagaagataaagcggaagatgaaggcaacggttgacccgctggagaagaaactcctcgattacaggcagaggcttataaaaatcctcgccaacagcttctacggctactacggctacgccaaggcccggtggtactgcaaggagtgcgccgagagcgttacggcctggggaagggagtatatagaaatggttatccgggaactcgaagaaaaattcggttttaaagttctctatgccgatacagacggtctccatgctaccattcccggagcagacgctgaaacagtcaagaaaaaagcaaaggagttcttaaaatacattaatccaaaactgcccggcctgctcgaacttgagtacgagggcttctacgtgaggggcttcttcgtcacgaagaagaagtacgctgtgatagacgaggagggcaagataaccacgaggggtcttgagattgtgaggcgcgactggagcgagatagcgaaggagacccaggccagggtcttagaggcgatactcaagcacggtgacgtcgaggaggccgttaggatagtcaaggaagtgacggaaaagctgagcaagtatgaggtcccgcccgagaagctggtaatccacgagcagataacgcgcgatttgagggattacaaagccaccggcccgcacgttgccgttgcgaagaggctcgcggcgcgtggagtgaaaatccggcccggcacggtgataagctacatcgtcctaaagggctctggaaggataggcgacagggcgattccagctgatgagttcgacccgacgaagcaccgctacgatgcggaatactacatcgagaaccaggttctcccggcggtggagaggattctaaaagccttcggctatcggaaggaggatttgcgctaccagaagacgaagcaggtcggctcgggcgcgtggctgaaggtgaaggggaagaagggtaccgaagcttacgtagaacaaaaactcatctcagaagaggatctgaatagcgccgtcgaccatcatcatcatcatcattga

SEQ ID NO: 4 - protein, 802 aa, Artificial Sequence
  Description of Artificial Sequence:Thermococcus species 9degreesN-7 mutant DNA polymerase, 9degreesN mutant
MILDTDYITENGKPVIRVFKKENGEFKIEYDRTFEPYFYALLKDDSAIEDVKKVTAKRHGTVVKVKRAEKVQKKFLGRPIEVWKLYFNHPQDVPAIRDRIRAHPAVVDIYEYDIPFAKRYLIDKGLIPMEGDEELTMLAFAIATLYHEGEEFGTGPILMISYADGSEARVITWKKIDLPYVDVVSTEKEMIKRFLRVVREKDPDVLITYNGDNFDFAYLKKRCEELGIKFTLGRDGSEPKIQRMGDRFAVEVKGRIHFDLYPVIRRTINLPTYTLEAVYEAVFGKPKEKVYAEEIAQAWESGEGLERVARYSMEDAKVTYELGREFFPMEAQLSRRIGQSLWDVSRSSTGNLVEWFLLRKAYKRNELAPNKPDERELARRRGGYAGGYVKEPERGLWDNIVYLDFRSLYPSIIITHNVSPDTLNREGCKEYDVAPEVGHKFCKDFPGFIPSLLGDLLEERQKIKRKMKATVDPLEKKLLDYRQRLIKILANSFYGYYGYAKARWYCKECAESVTAWGREYIEMVIRELEEKFGFKVLYADTDGLHATIPGADAETVKKKAKEFLKYINPKLPGLLELEYEGFYVRGFFVTKKKYAVIDEEGKITTRGLEIVRRDWSEIAKETQARVLEAILKHGDVEEAVRIVKEVTEKLSKYEVPPEKLVIHEQITRDLRDYKATGPHVAVAKRLAARGVKIRPGTVISYIVLKGSGRIGDRAIPADEFDPTKHRYDAEYYIENQVLPAVERILKAFGYRKEDLRYQKTKQVGSGAWLKVKGKKGTEAYVEQKLISEEDLNSAVDHHHHHH

SEQ ID NO: 5 - DNA, 2409 bp, Artificial Sequence
  Description of Artificial Sequence:Thermococcus species 9degreesN-7 mutant DNA polymerase, 9degreesN mutant
atgattctcgataccgactacatcaccgagaacgggaagcccgtgataagggtcttcaagaaggagaacggcgagtttaaaatcgagtacgacagaaccttcgagccctacttctacgcccttctgaaggacgattctgcgatagaggacgtcaagaaggtaaccgcaaagaggcacggaacggttgtcaaggtgaagcgcgccgagaaggtgcagaagaagttcctcggcaggccgatagaggtctggaagctctacttcaaccatcctcaggacgtcccggcgattcgagacaggatacgcgcccaccccgctgtcgttgacatctacgagtacgacatacccttcgccaagcgctacctcatcgacaagggcctgattccgatggagggcgacgaggagcttacgatgctcgccttcgcgatcgcaaccctctatcacgagggcgaggagttcggaaccgggccgattctcatgataagctacgccgacgggagcgaggcgagggtgataacctggaagaagattgaccttccgtacgttgacgtcgtctcgaccgagaaggagatgattaagcgcttcctccgcgtcgtcagggagaaggaccccgacgtgctcatcacctacaacggcgacaacttcgacttcgcctacctgaagaagcgctgtgaggaactcggaataaagttcacactcggcagggacgggagcgagccgaagatacagcgaatgggcgaccgctttgccgttgaggtgaagggcaggattcacttcgacctctaccccgtcataaggcgcacgataaacctcccgacctacacccttgaggccgtttacgaggccgtctttggaaagcccaaggagaaggtttacgcagaggagatagcgcaggcctgggagagcggggagggccttgaaagggttgcaagatactcgatggaggacgctaaggtgacctacgagctgggaagggagttcttcccgatggaggcccagctttcgaggcttataggccagagcctctgggacgtctcgcgctcgagcaccggaaatttggtggagtggttcctcctgcggaaggcctacaagaggaacgagctcgccccaaacaagcccgacgagagggagctcgcgagacggcgcgggggctacgctggcgggtacgttaaggaaccagagcggggattgtgggacaacattgtgtatttagacttccgctcgctgtatccttcaatcatcataacccacaacgtctcgccggataccctcaaccgcgagggctgtaaagagtacgacgtcgcccctgaggttggacacaagttctgcaaggacttccccggcttcataccaagcctcctgggagatttgctcgaggagaggcagaagataaagcggaagatgaaggcaacggttgacccgctggagaagaaactcctcgattacaggcagaggcggatcaaaatcctcgccaacagcttctacggctactacggctacgccaaggcccggtggtactgcaaggagtgcgccgagagcgttacggcctggggaagggagtatatagaaatggttatccgggaactcgaagaaaaattcggttttaaagttctctatgccgatacagacggtctccatgctaccattcccggagcagacgctgaaacagtcaagaaaaaagcaaaggagttcttaaaatacattaatccaaaactgcccggcctgctcgaacttgagtacgagggcttctacgtgaggggcttcttcgtcacgaagaagaagtacgctgtgatagacgaggagggcaagataaccacgaggggtcttgagattgtgaggcgcgactggagcgagatagcgaaggagacccaggccagggtcttagaggcgatactcaagcacggtgacgtcgaggaggccgttaggatagtcaaggaagtgacggaaaagctgagcaagtatgaggtcccgcccgagaagctggtaatccacgagcagataacgcgcgatttgagggattacaaagccaccggcccgcacgttgccgttgcgaagaggctcgcggcgcgtggagtgaaaatccggcccggcacggtgataagctacatcgtcctaaagggctctggaaggataggcgacagggcgattccagctgatgagttcgacccgacgaagcaccgctacgatgcggaatactacatcgagaaccaggttctcccggcggtggagaggattctaaaagccttcggctatcggaaggaggatttgcgctaccagaagacgaagcaggtcggctcgggcgcgtggctgaaggtgaaggggaagaagggtaccgaagcttacgtagaacaaaaactcatctcagaagaggatctgaatagcgccgtcgaccatcatcatcatcatcattga

SEQ ID NO: 6 - protein, 802 aa, Artificial Sequence
  Description of Artificial Sequence:Thermococcus species 9degreesN-7 mutant DNA polymerase, 9degreesN mutant
MILDTDYITENGKPVIRVFKKENGEFKIEYDRTFEPYFYALLKDDSAIEDVKKVTAKRHGTVVKVKRAEKVQKKFLGRPIEVWKLYFNHPQDVPAIRDRIRAHPAVVDIYEYDIPFAKRYLIDKGLIPMEGDEELTMLAFAIATLYHEGEEFGTGPILMISYADGSEARVITWKKIDLPYVDVVSTEKEMIKRFLRVVREKDPDVLITYNGDNFDFAYLKKRCEELGIKFTLGRDGSEPKIQRMGDRFAVEVKGRIHFDLYPVIRRTINLPTYTLEAVYEAVFGKPKEKVYAEEIAQAWESGEGLERVARYSMEDAKVTYELGREFFPMEAQLSRLIGQSLWDVSRSSTGNLVEWFLLRKAYKRNELAPNKPDERELARRRGGYAGGYVKEPERGLWDNIVYLDFRSLYPSIIITHNVSPDTLNREGCKEYDVAPEVGHKFCKDFPGFIPSLLGDLLEERQKIKRKMKATVDPLEKKLLDYRQRRIKILANSFYGYYGYAKARWYCKECAESVTAWGREYIEMVIRELEEKFGFKVLYADTDGLHATIPGADAETVKKKAKEFLKYINPKLPGLLELEYEGFYVRGFFVTKKKYAVIDEEGKITTRGLEIVRRDWSEIAKETQARVLEAILKHGDVEEAVRIVKEVTEKLSKYEVPPEKLVIHEQITRDLRDYKATGPHVAVAKRLAARGVKIRPGTVISYIVLKGSGRIGDRAIPADEFDPTKHRYDAEYYIENQVLPAVERILKAFGYRKEDLRYQKTKQVGSGAWLKVKGKKGTEAYVEQKLISEEDLNSAVDHHHHHH

SEQ ID NO: 7 - DNA, 2409 bp, Artificial Sequence
  Description of Artificial Sequence:Thermococcus species 9degreesN-7 mutant DNA polymerase, 9degreesN mutant
atgattctcgataccgactacatcaccgagaacgggaagcccgtgataagggtcttcaagaaggagaacggcgagtttaaaatcgagtacgacagaaccttcgagccctacttctacgcccttctgaaggacgattctgcgatagaggacgtcaagaaggtaaccgcaaagaggcacggaacggttgtcaaggtgaagcgcgccgagaaggtgcagaagaagttcctcggcaggccgatagaggtctggaagctctacttcaaccatcctcaggacgtcccggcgattcgagacaggatacgcgcccaccccgctgtcgttgacatctacgagtacgacatacccttcgccaagcgctacctcatcgacaagggcctgattccgatggagggcgacgaggagcttacgatgctcgccttcgcgatcgcaaccctctatcacgagggcgaggagttcggaaccgggccgattctcatgataagctacgccgacgggagcgaggcgagggtgataacctggaagaagattgaccttccgtacgttgacgtcgtctcgaccgagaaggagatgattaagcgcttcctccgcgtcgtcagggagaaggaccccgacgtgctcatcacctacaacggcgacaacttcgacttcgcctacctgaagaagcgctgtgaggaactcggaataaagttcacactcggcagggacgggagcgagccgaagatacagcgaatgggcgaccgctttgccgttgaggtgaagggcaggattcacttcgacctctaccccgtcataaggcgcacgataaacctcccgacctacacccttgaggccgtttacgaggccgtctttggaaagcccaaggagaaggtttacgcagaggagatagcgcaggcctgggagagcggggagggccttgaaagggttgcaagatactcgatggaggacgctaaggtgacctacgagctgggaagggagttcttcccgatggaggccgacctttcgaggcttataggccagagcctctgggacgtctcgcgctcgagcaccggaaatttggtggagtggttcctcctgcggaaggcctacaagaggaacgagctcgccccaaacaagcccgacgagagggagctcgcgagacggcgcgggggctacgctggcgggtacgttaaggaaccagagcggggattgtgggacaacattgtgtatttagacttccgctcgctgtatccttcaatcatcataacccacaacgtctcgccggataccctcaaccgcgagggctgtaaagagtacgacgtcgcccctgaggttggacacaagttctgcaaggacttccccggcttcataccaagcctcctgggagatttgctcgaggagaggcagaagataaagcggaagatgaaggcaacggttgacccgctggagaagaaactcctcgattacaggcagaggcttataaaaatcctcgccaacagcttctacggctactacggctacgccaaggcccggtggtactgcaaggagtgcgccgagagcgttacggcctggggaagggagtatatagaaatggttatccgggaactcgaagaaaaattcggttttaaagttctctatgccgatacagacggtctccatgctaccattcccggagcagacgctgaaacagtcaagaaaaaagcaaaggagttcttaaaatacattaatccaaaactgcccggcctgctcgaacttgagtacgagggcttctacgtgaggggcttcttcgtcacgaagaagaagtacgctgtgatagacgaggagggcaagataaccacgaggggtcttgagattgtgaggcgcgactggagcgagatagcgaaggagacccaggccagggtcttagaggcgatactcaagcacggtgacgtcgaggaggccgttaggatagtcaaggaagtgacggaaaagctgagcaagtatgaggtcccgcccgagaagctggtaatccacgagcagataacgcgcgatttgagggattacaaagccaccggcccgcacgttgccgttgcgaagaggctcgcggcgcgtggagtgaaaatccggcccggcacggtgataagctacatcgtcctaaagggctctggaaggataggcgacagggcgattccagctgatgagttcgacccgacgaagcaccgctacgatgcggaatactacatcgagaaccaggttctcccggcggtggagaggattctaaaagccttcggctatcggaaggaggatttgcgctaccagaagacgaagcaggtcggctcgggcgcgtggctgaaggtgaaggggaagaagggtaccgaagcttacgtagaacaaaaactcatctcagaagaggatctgaatagcgccgtcgaccatcatcatcatcatcattga

SEQ ID NO: 8 - protein, 802 aa, Artificial Sequence
  Description of Artificial Sequence:Thermococcus species 9degreesN-7 mutant DNA polymerase, 9degreesN mutant
MILDTDYITENGKPVIRVFKKENGEFKIEYDRTFEPYFYALLKDDSAIEDVKKVTAKRHGTVVKVKRAEKVQKKFLGRPIEVWKLYFNHPQDVPAIRDRIRAHPAVVDIYEYDIPFAKRYLIDKGLIPMEGDEELTMLAFAIATLYHEGEEFGTGPILMISYADGSEARVITWKKIDLPYVDVVSTEKEMIKRFLRVVREKDPDVLITYNGDNFDFAYLKKRCEELGIKFTLGRDGSEPKIQRMGDRFAVEVKGRIHFDLYPVIRRTINLPTYTLEAVYEAVFGKPKEKVYAEEIAQAWESGEGLERVARYSMEDAKVTYELGREFFPMEADLSRLIGQSLWDVSRSSTGNLVEWFLLRKAYKRNELAPNKPDERELARRRGGYAGGYVKEPERGLWDNIVYLDFRSLYPSIIITHNVSPDTLNREGCKEYDVAPEVGHKFCKDFPGFIPSLLGDLLEERQKIKRKMKATVDPLEKKLLDYRQRLIKILANSFYGYYGYAKARWYCKECAESVTAWGREYIEMVIRELEEKFGFKVLYADTDGLHATIPGADAETVKKKAKEFLKYINPKLPGLLELEYEGFYVRGFFVTKKKYAVIDEEGKITTRGLEIVRRDWSEIAKETQARVLEAILKHGDVEEAVRIVKEVTEKLSKYEVPPEKLVIHEQITRDLRDYKATGPHVAVAKRLAARGVKIRPGTVISYIVLKGSGRIGDRAIPADEFDPTKHRYDAEYYIENQVLPAVERILKAFGYRKEDLRYQKTKQVGSGAWLKVKGKKGTEAYVEQKLISEEDLNSAVDHHHHHH

SEQ ID NO: 9 - DNA, 2409 bp, Artificial Sequence
  Description of Artificial Sequence:Thermococcus species 9degreesN-7 mutant DNA polymerase, 9degreesN mutant
atgattctcgataccgactacatcaccgagaacgggaagcccgtgataagggtcttcaagaaggagaacggcgagtttaaaatcgagtacgacagaaccttcgagccctacttctacgcccttctgaaggacgattctgcgatagaggacgtcaagaaggtaaccgcaaagaggcacggaacggttgtcaaggtgaagcgcgccgagaaggtgcagaagaagttcctcggcaggccgatagaggtctggaagctctacttcaaccatcctcaggacgtcccggcgattcgagacaggatacgcgcccaccccgctgtcgttgacatctacgagtacgacatacccttcgccaagcgctacctcatcgacaagggcctgattccgatggagggcgacgaggagcttacgatgctcgccttcgcgatcgcaaccctctatcacgagggcgaggagttcggaaccgggccgattctcatgataagctacgccgacgggagcgaggcgagggtgataacctggaagaagattgaccttccgtacgttgacgtcgtctcgaccgagaaggagatgattaagcgcttcctccgcgtcgtcagggagaaggaccccgacgtgctcatcacctacaacggcgacaacttcgacttcgcctacctgaagaagcgctgtgaggaactcggaataaagttcacactcggcagggacgggagcgagccgaagatacagcgaatgggcgaccgctttgccgttgaggtgaagggcaggattcacttcgacctctaccccgtcataaggcgcacgataaacctcccgacctacacccttgaggccgtttacgaggccgtctttggaaagcccaaggagaaggtttacgcagaggagatagcgcaggcctgggagagcggggagggccttgaaagggttgcaagatactcgatggaggacgctaaggtgacctacgagctgggaagggagttcttcccgagcgaggcccagctttcgaggcttataggccagagcctctgggacgtctcgcgctcgagcaccggaaatttggtggagtggttcctcctgcggaaggcctacaagaggaacgagctcgccccaaacaagcccgacgagagggagctcgcgagacggcgcgggggctacgctggcgggtacgttaaggaaccagagcggggattgtgggacaacattgtgtatttagacttccgctcgctgtatccttcaatcatcataacccacaacgtctcgccggataccctcaaccgcgagggctgtaaagagtacgacgtcgcccctgaggttggacacaagttctgcaaggacttccccggcttcataccaagcctcctgggagatttgctcgaggagaggcagaagataaagcggaagatgaaggcaacggttgacccgctggagaagaaactcctcgattacaggcagaggcgcatcaaaatcctcgccaacagcttctacggctactacggctacgccaaggcccggtggtactgcaaggagtgcgccgagagcgttacggcctggggaagggagtatatagaaatggttatccgggaactcgaagaaaaattcggttttaaagttctctatgccgatacagacggtctccatgctaccattcccggagcagacgctgaaacagtcaagaaaaaagcaaaggagttcttaaaatacattaatccaaaactgcccggcctgctcgaacttgagtacgagggcttctacgtgaggggcttcttcgtcacgaagaagaagtacgctgtgatagacgaggagggcaagataaccacgaggggtcttgagattgtgaggcgcgactggagcgagatagcgaaggagacccaggccagggtcttagaggcgatactcaagcacggtgacgtcgaggaggccgttaggatagtcaaggaagtgacggaaaagctgagcaagtatgaggtcccgcccgagaagctggtaatccacgagcagataacgcgcgatttgagggattacaaagccaccggcccgcacgttgccgttgcgaagaggctcgcggcgcgtggagtgaaaatccggcccggcacggtgataagctacatcgtcctaaagggctctggaaggataggcgacagggcgattccagctgatgagttcgacccgacgaagcaccgctacgatgcggaatactacatcgagaaccaggttctcccggcggtggagaggattctaaaagccttcggctatcggaaggaggatttgcgctaccagaagacgaagcaggtcggctcgggcgcgtggctgaaggtgaaggggaagaagggtaccgaagcttacgtagaacaaaaactcatctcagaagaggatctgaatagcgccgtcgaccatcatcatcatcatcattga

SEQ ID NO: 10 - protein, 802 aa, Artificial Sequence
  Description of Artificial Sequence:Thermococcus species 9degreesN-7 mutant DNA polymerase, 9degreesN mutant
MILDTDYITENGKPVIRVFKKENGEFKIEYDRTFEPYFYALLKDDSAIEDVKKVTAKRHGTVVKVKRAEKVQKKFLGRPIEVWKLYFNHPQDVPAIRDRIRAHPAVVDIYEYDIPFAKRYLIDKGLIPMEGDEELTMLAFAIATLYHEGEEFGTGPILMISYADGSEARVITWKKIDLPYVDVVSTEKEMIKRFLRVVREKDPDVLITYNGDNFDFAYLKKRCEELGIKFTLGRDGSEPKIQRMGDRFAVEVKGRIHFDLYPVIRRTINLPTYTLEAVYEAVFGKPKEKVYAEEIAQAWESGEGLERVARYSMEDAKVTYELGREFFPSEAQLSRLIGQSLWDVSRSSTGNLVEWFLLRKAYKRNELAPNKPDERELARRRGGYAGGYVKEPERGLWDNIVYLDFRSLYPSIIITHNVSPDTLNREGCKEYDVAPEVGHKFCKDFPGFIPSLLGDLLEERQKIKRKMKATVDPLEKKLLDYRQRRIKILANSFYGYYGYAKARWYCKECAESVTAWGREYIEMVIRELEEKFGFKVLYADTDGLHATIPGADAETVKKKAKEFLKYINPKLPGLLELEYEGFYVRGFFVTKKKYAVIDEEGKITTRGLEIVRRDWSEIAKETQARVLEAILKHGDVEEAVRIVKEVTEKLSKYEVPPEKLVIHEQITRDLRDYKATGPHVAVAKRLAARGVKIRPGTVISYIVLKGSGRIGDRAIPADEFDPTKHRYDAEYYIENQVLPAVERILKAFGYRKEDLRYQKTKQVGSGAWLKVKGKKGTEAYVEQKLISEEDLNSAVDHHHHHH

SEQ ID NO: 11 - DNA, 2409 bp, Artificial Sequence
  Description of Artificial Sequence:Thermococcus species 9degreesN-7 mutant DNA polymerase, 9degreesN mutant
atgattctcgataccgactacatcaccgagaacgggaagcccgtgataagggtcttcaagaaggagaacggcgagtttaaaatcgagtacgacagaaccttcgagccctacttctacgcccttctgaaggacgattctgcgatagaggacgtcaagaaggtaaccgcaaagaggcacggaacggttgtcaaggtgaagcgcgccgagaaggtgcagaagaagttcctcggcaggccgatagaggtctggaagctctacttcaaccatcctcaggacgtcccggcgattcgagacaggatacgcgcccaccccgctgtcgttgacatctacgagtacgacatacccttcgccaagcgctacctcatcgacaagggcctgattccgatggagggcgacgaggagcttacgatgctcgccttcgcgatcgcaaccctctatcacgagggcgaggagttcggaaccgggccgattctcatgataagctacgccgacgggagcgaggcgagggtgataacctggaagaagattgaccttccgtacgttgacgtcgtctcgaccgagaaggagatgattaagcgcttcctccgcgtcgtcagggagaaggaccccgacgtgctcatcacctacaacggcgacaacttcgacttcgcctacctgaagaagcgctgtgaggaactcggaataaagttcacactcggcagggacgggagcgagccgaagatacagcgaatgggcgaccgctttgccgttgaggtgaagggcaggattcacttcgacctctaccccgtcataaggcgcacgataaacctcccgacctacacccttgaggccgtttacgaggccgtctttggaaagcccaaggagaaggtttacgcagaggagatagcgcaggcctgggagagcggggagggccttgaaagggttgcaagatactcgatggaggacgctaaggtgacctacgagctgggaagggagttcttcccgacagaggcccagctttcgaggcttataggccagagcctctgggacgtctcgcgctcgagcaccggaaatttggtggagtggttcctcctgcggaaggcctacaagaggaacgagctcgccccaaacaagcccgacgagagggagctcgcgagacggcgcgggggctacgctggcgggtacgttaaggaaccagagcggggattgtgggacaacattgtgtatttagacttccgctcgctgtatccttcaatcatcataacccacaacgtctcgccggataccctcaaccgcgagggctgtaaagagtacgacgtcgcccctgaggttggacacaagttctgcaaggacttccccggcttcataccaagcctcctgggagatttgctcgaggagaggcagaagataaagcggaagatgaaggcaacggttgacccgctggagaagaaactcctcgattacaggcagagggggatcaaaatcctcgccaacagcttctacggctactacggctacgccaaggcccggtggtactgcaaggagtgcgccgagagcgttacggcctggggaagggagtatatagaaatggttatccgggaactcgaagaaaaattcggttttaaagttctctatgccgatacagacggtctccatgctaccattcccggagcagacgctgaaacagtcaagaaaaaagcaaaggagttcttaaaatacattaatccaaaactgcccggcctgctcgaacttgagtacgagggcttctacgtgaggggcttcttcgtcacgaagaagaagtacgctgtgatagacgaggagggcaagataaccacgaggggtcttgagattgtgaggcgcgactggagcgagatagcgaaggagacccaggccagggtcttagaggcgatactcaagcacggtgacgtcgaggaggccgttaggatagtcaaggaagtgacggaaaagctgagcaagtatgaggtcccgcccgagaagctggtaatccacgagcagataacgcgcgatttgagggattacaaagccaccggcccgcacgttgccgttgcgaagaggctcgcggcgcgtggagtgaaaatccggcccggcacggtgataagctacatcgtcctaaagggctctggaaggataggcgacagggcgattccagctgatgagttcgacccgacgaagcaccgctacgatgcggaatactacatcgagaaccaggttctcccggcggtggagaggattctaaaagccttcggctatcggaaggaggatttgcgctaccagaagacgaagcaggtcggctcgggcgcgtggctgaaggtgaaggggaagaagggtaccgaagcttacgtagaacaaaaactcatctcagaagaggatctgaatagcgccgtcgaccatcatcatcatcatcattga

SEQ ID NO: 12 - protein, 802 aa, Artificial Sequence
  Description of Artificial Sequence:Thermococcus species 9degreesN-7 mutant DNA polymerase, 9degreesN mutant
MILDTDYITENGKPVIRVFKKENGEFKIEYDRTFEPYFYALLKDDSAIEDVKKVTAKRHGTVVKVKRAEKVQKKFLGRPIEVWKLYFNHPQDVPAIRDRIRAHPAVVDIYEYDIPFAKRYLIDKGLIPMEGDEELTMLAFAIATLYHEGEEFGTGPILMISYADGSEARVITWKKIDLPYVDVVSTEKEMIKRFLRVVREKDPDVLITYNGDNFDFAYLKKRCEELGIKFTLGRDGSEPKIQRMGDRFAVEVKGRIHFDLYPVIRRTINLPTYTLEAVYEAVFGKPKEKVYAEEIAQAWESGEGLERVARYSMEDAKVTYELGREFFPTEAQLSRLIGQSLWDVSRSSTGNLVEWFLLRKAYKRNELAPNKPDERELARRRGGYAGGYVKEPERGLWDNIVYLDFRSLYPSIIITHNVSPDTLNREGCKEYDVAPEVGHKFCKDFPGFIPSLLGDLLEERQKIKRKMKATVDPLEKKLLDYRQRGIKILANSFYGYYGYAKARWYCKECAESVTAWGREYIEMVIRELEEKFGFKVLYADTDGLHATIPGADAETVKKKAKEFLKYINPKLPGLLELEYEGFYVRGFFVTKKKYAVIDEEGKITTRGLEIVRRDWSEIAKETQARVLEAILKHGDVEEAVRIVKEVTEKLSKYEVPPEKLVIHEQITRDLRDYKATGPHVAVAKRLAARGVKIRPGTVISYIVLKGSGRIGDRAIPADEFDPTKHRYDAEYYIENQVLPAVERILKAFGYRKEDLRYQKTKQVGSGAWLKVKGKKGTEAYVEQKLISEEDLNSAVDHHHHHH

SEQ ID NO: 13 - DNA, 2409 bp, Artificial Sequence
  Description of Artificial Sequence:Thermococcus species 9degreesN-7 mutant DNA polymerase, 9degreesN mutant
atgattctcgataccgactacatcaccgagaacgggaagcccgtgataagggtcttcaagaaggagaacggcgagtttaaaatcgagtacgacagaaccttcgagccctacttctacgcccttctgaaggacgattctgcgatagaggacgtcaagaaggtaaccgcaaagaggcacggaacggttgtcaaggtgaagcgcgccgagaaggtgcagaagaagttcctcggcaggccgatagaggtctggaagctctacttcaaccatcctcaggacgtcccggcgattcgagacaggatacgcgcccaccccgctgtcgttgacatctacgagtacgacatacccttcgccaagcgctacctcatcgacaagggcctgattccgatggagggcgacgaggagcttacgatgctcgccttcgcgatcgcaaccctctatcacgagggcgaggagttcggaaccgggccgattctcatgataagctacgccgacgggagcgaggcgagggtgataacctggaagaagattgaccttccgtacgttgacgtcgtctcgaccgagaaggagatgattaagcgcttcctccgcgtcgtcagggagaaggaccccgacgtgctcatcacctacaacggcgacaacttcgacttcgcctacctgaagaagcgctgtgaggaactcggaataaagttcacactcggcagggacgggagcgagccgaagatacagcgaatgggcgaccgctttgccgttgaggtgaagggcaggattcacttcgacctctaccccgtcataaggcgcacgataaacctcccgacctacacccttgaggccgtttacgaggccgtctttggaaagcccaaggagaaggtttacgcagaggagatagcgcaggcctgggagagcggggagggccttgaaagggttgcaagatactcgatggaggacgctaaggtgacctacgagctgggaagggagttcttcccgcaagaggcccagctttcgaggcttataggccagagcctctgggacgtctcgcgctcgagcaccggaaatttggtggagtggttcctcctgcggaaggcctacaagaggaacgagctcgccccaaacaagcccgacgagagggagctcgcgagacggcgcgggggctacgctggcgggtacgttaaggaaccagagcggggattgtgggacaacattgtgtatttagacttccgctcgctgtatccttcaatcatcataacccacaacgtctcgccggataccctcaaccgcgagggctgtaaagagtacgacgtcgcccctgaggttggacacaagttctgcaaggacttccccggcttcataccaagcctcctgggagatttgctcgaggagaggcagaagataaagcggaagatgaaggcaacggttgacccgctggagaagaaactcctcgattacaggcagaggcgcatcaaaatcctcgccaacagcttctacggctactacggctacgccaaggcccggtggtactgcaaggagtgcgccgagagcgttacggcctggggaagggagtatatagaaatggttatccgggaactcgaagaaaaattcggttttaaagttctctatgccgatacagacggtctccatgctaccattcccggagcagacgctgaaacagtcaagaaaaaagcaaaggagttcttaaaatacattaatccaaaactgcccggcctgctcgaacttgagtacgagggcttctacgtgaggggcttcttcgtcacgaagaagaagtacgctgtgatagacgaggagggcaagataaccacgaggggtcttgagattgtgaggcgcgactggagcgagatagcgaaggagacccaggccagggtcttagaggcgatactcaagcacggtgacgtcgaggaggccgttaggatagtcaaggaagtgacggaaaagctgagcaagtatgaggtcccgcccgagaagctggtaatccacgagcagataacgcgcgatttgagggattacaaagccaccggcccgcacgttgccgttgcgaagaggctcgcggcgcgtggagtgaaaatccggcccggcacggtgataagctacatcgtcctaaagggctctggaaggataggcgacagggcgattccagctgatgagttcgacccgacgaagcaccgctacgatgcggaatactacatcgagaaccaggttctcccggcggtggagaggattctaaaagccttcggctatcggaaggaggatttgcgctaccagaagacgaagcaggtcggctcgggcgcgtggctgaaggtgaaggggaagaagggtaccgaagcttacgtagaacaaaaactcatctcagaagaggatctgaatagcgccgtcgaccatcatcatcatcatcattga

SEQ ID NO: 14 - protein, 802 aa, Artificial Sequence
  Description of Artificial Sequence:Thermococcus species 9degreesN-7 mutant DNA polymerase, 9degreesN mutant
MILDTDYITENGKPVIRVFKKENGEFKIEYDRTFEPYFYALLKDDSAIEDVKKVTAKRHGTVVKVKRAEKVQKKFLGRPIEVWKLYFNHPQDVPAIRDRIRAHPAVVDIYEYDIPFAKRYLIDKGLIPMEGDEELTMLAFAIATLYHEGEEFGTGPILMISYADGSEARVITWKKIDLPYVDVVSTEKEMIKRFLRVVREKDPDVLITYNGDNFDFAYLKKRCEELGIKFTLGRDGSEPKIQRMGDRFAVEVKGRIHFDLYPVIRRTINLPTYTLEAVYEAVFGKPKEKVYAEEIAQAWESGEGLERVARYSMEDAKVTYELGREFFPQEAQLSRLIGQSLWDVSRSSTGNLVEWFLLRKAYKRNELAPNKPDERELARRRGGYAGGYVKEPERGLWDNIVYLDFRSLYPSIIITHNVSPDTLNREGCKEYDVAPEVGHKFCKDFPGFIPSLLGDLLEERQKIKRKMKATVDPLEKKLLDYRQRRIKILANSFYGYYGYAKARWYCKECAESVTAWGREYIEMVIRELEEKFGFKVLYADTDGLHATIPGADAETVKKKAKEFLKYINPKLPGLLELEYEGFYVRGFFVTKKKYAVIDEEGKITTRGLEIVRRDWSEIAKETQARVLEAILKHGDVEEAVRIVKEVTEKLSKYEVPPEKLVIHEQITRDLRDYKATGPHVAVAKRLAARGVKIRPGTVISYIVLKGSGRIGDRAIPADEFDPTKHRYDAEYYIENQVLPAVERILKAFGYRKEDLRYQKTKQVGSGAWLKVKGKKGTEAYVEQKLISEEDLNSAVDHHHHHH

SEQ ID NO: 15 - DNA, 2409 bp, Artificial Sequence
  Description of Artificial Sequence:Thermococcus species 9degreesN-7 mutant DNA polymerase, 9degreesN mutant
atgattctcgataccgactacatcaccgagaacgggaagcccgtgataagggtcttcaagaaggagaacggcgagtttaaaatcgagtacgacagaaccttcgagccctacttctacgcccttctgaaggacgattctgcgatagaggacgtcaagaaggtaaccgcaaagaggcacggaacggttgtcaaggtgaagcgcgccgagaaggtgcagaagaagttcctcggcaggccgatagaggtctggaagctctacttcaaccatcctcaggacgtcccggcgattcgagacaggatacgcgcccaccccgctgtcgttgacatctacgagtacgacatacccttcgccaagcgctacctcatcgacaagggcctgattccgatggagggcgacgaggagcttacgatgctcgccttcgcgatcgcaaccctctatcacgagggcgaggagttcggaaccgggccgattctcatgataagctacgccgacgggagcgaggcgagggtgataacctggaagaagattgaccttccgtacgttgacgtcgtctcgaccgagaaggagatgattaagcgcttcctccgcgtcgtcagggagaaggaccccgacgtgctcatcacctacaacggcgacaacttcgacttcgcctacctgaagaagcgctgtgaggaactcggaataaagttcacactcggcagggacgggagcgagccgaagatacagcgaatgggcgaccgctttgccgttgaggtgaagggcaggattcacttcgacctctaccccgtcataaggcgcacgataaacctcccgacctacacccttgaggccgtttacgaggccgtctttggaaagcccaaggagaaggtttacgcagaggagatagcgcaggcctgggagagcggggagggccttgaaagggttgcaagatactcgatggaggacgctaaggtgacctacgagctgggaagggagttcttcccgatcgaggcccagctttcgaggcttataggccagagcctctgggacgtctcgcgctcgagcaccggaaatttggtggagtggttcctcctgcggaaggcctacaagaggaacgagctcgccccaaacaagcccgacgagagggagctcgcgagacggcgcgggggctacgctggcgggtacgttaaggaaccagagcggggattgtgggacaacattgtgtatttagacttccgctcgctgtatccttcaatcatcataacccacaacgtctcgccggataccctcaaccgcgagggctgtaaagagtacgacgtcgcccctgaggttggacacaagttctgcaaggacttccccggcttcataccaagcctcctgggagatttgctcgaggagaggcagaagataaagcggaagatgaaggcaacggttgacccgctggagaagaaactcctcgattacaggcagaggaaaatcaaaatcctcgccaacagcttctacggctactacggctacgccaaggcccggtggtactgcaaggagtgcgccgagagcgttacggcctggggaagggagtatatagaaatggttatccgggaactcgaagaaaaattcggttttaaagttctctatgccgatacagacggtctccatgctaccattcccggagcagacgctgaaacagtcaagaaaaaagcaaaggagttcttaaaatacattaatccaaaactgcccggcctgctcgaacttgagtacgagggcttctacgtgaggggcttcttcgtcacgaagaagaagtacgctgtgatagacgaggagggcaagataaccacgaggggtcttgagattgtgaggcgcgactggagcgagatagcgaaggagacccaggccagggtcttagaggcgatactcaagcacggtgacgtcgaggaggccgttaggatagtcaaggaagtgacggaaaagctgagcaagtatgaggtcccgcccgagaagctggtaatccacgagcagataacgcgcgatttgagggattacaaagccaccggcccgcacgttgccgttgcgaagaggctcgcggcgcgtggagtgaaaatccggcccggcacggtgataagctacatcgtcctaaagggctctggaaggataggcgacagggcgattccagctgatgagttcgacccgacgaagcaccgctacgatgcggaatactacatcgagaaccaggttctcccggcggtggagaggattctaaaagccttcggctatcggaaggaggatttgcgctaccagaagacgaagcaggtcggctcgggcgcgtggctgaaggtgaaggggaagaagggtaccgaagcttacgtagaacaaaaactcatctcagaagaggatctgaatagcgccgtcgaccatcatcatcatcatcattga

SEQ ID NO: 16 - protein, 802 aa, Artificial Sequence
  Description of Artificial Sequence:Thermococcus species 9degreesN-7 mutant DNA polymerase, 9degreesN mutant
MILDTDYITENGKPVIRVFKKENGEFKIEYDRTFEPYFYALLKDDSAIEDVKKVTAKRHGTVVKVKRAEKVQKKFLGRPIEVWKLYFNHPQDVPAIRDRIRAHPAVVDIYEYDIPFAKRYLIDKGLIPMEGDEELTMLAFAIATLYHEGEEFGTGPILMISYADGSEARVITWKKIDLPYVDVVSTEKEMIKRFLRVVREKDPDVLITYNGDNFDFAYLKKRCEELGIKFTLGRDGSEPKIQRMGDRFAVEVKGRIHFDLYPVIRRTINLPTYTLEAVYEAVFGKPKEKVYAEEIAQAWESGEGLERVARYSMEDAKVTYELGREFFPIEAQLSRLIGQSLWDVSRSSTGNLVEWFLLRKAYKRNELAPNKPDERELARRRGGYAGGYVKEPERGLWDNIVYLDFRSLYPSIIITHNVSPDTLNREGCKEYDVAPEVGHKFCKDFPGFIPSLLGDLLEERQKIKRKMKATVDPLEKKLLDYRQRKIKILANSFYGYYGYAKARWYCKECAESVTAWGREYIEMVIRELEEKFGFKVLYADTDGLHATIPGADAETVKKKAKEFLKYINPKLPGLLELEYEGFYVRGFFVTKKKYAVIDEEGKITTRGLEIVRRDWSEIAKETQARVLEAILKHGDVEEAVRIVKEVTEKLSKYEVPPEKLVIHEQITRDLRDYKATGPHVAVAKRLAARGVKIRPGTVISYIVLKGSGRIGDRAIPADEFDPTKHRYDAEYYIENQVLPAVERILKAFGYRKEDLRYQKTKQVGSGAWLKVKGKKGTEAYVEQKLISEEDLNSAVDHHHHHH

SEQ ID NO: 17 - DNA, 2409 bp, Artificial Sequence
  Description of Artificial Sequence:Thermococcus species 9degreesN-7 mutant DNA polymerase, 9degreesN mutant
atgattctcgataccgactacatcaccgagaacgggaagcccgtgataagggtcttcaagaaggagaacggcgagtttaaaatcgagtacgacagaaccttcgagccctacttctacgcccttctgaaggacgattctgcgatagaggacgtcaagaaggtaaccgcaaagaggcacggaacggttgtcaaggtgaagcgcgccgagaaggtgcagaagaagttcctcggcaggccgatagaggtctggaagctctacttcaaccatcctcaggacgtcccggcgattcgagacaggatacgcgcccaccccgctgtcgttgacatctacgagtacgacatacccttcgccaagcgctacctcatcgacaagggcctgattccgatggagggcgacgaggagcttacgatgctcgccttcgcgatcgcaaccctctatcacgagggcgaggagttcggaaccgggccgattctcatgataagctacgccgacgggagcgaggcgagggtgataacctggaagaagattgaccttccgtacgttgacgtcgtctcgaccgagaaggagatgattaagcgcttcctccgcgtcgtcagggagaaggaccccgacgtgctcatcacctacaacggcgacaacttcgacttcgcctacctgaagaagcgctgtgaggaactcggaataaagttcacactcggcagggacgggagcgagccgaagatacagcgaatgggcgaccgctttgccgttgaggtgaagggcaggattcacttcgacctctaccccgtcataaggcgcacgataaacctcccgacctacacccttgaggccgtttacgaggccgtctttggaaagcccaaggagaaggtttacgcagaggagatagcgcaggcctgggagagcggggagggccttgaaagggttgcaagatactcgatggaggacgctaaggtgacctacgagctgggaagggagttcttcccgcacgaggcccagctttcgaggcttataggccagagcctctgggacgtctcgcgctcgagcaccggaaatttggtggagtggttcctcctgcggaaggcctacaagaggaacgagctcgccccaaacaagcccgacgagagggagctcgcgagacggcgcgggggctacgctggcgggtacgttaaggaaccagagcggggattgtgggacaacattgtgtatttagacttccgctcgctgtatccttcaatcatcataacccacaacgtctcgccggataccctcaaccgcgagggctgtaaagagtacgacgtcgcccctgaggttggacacaagttctgcaaggacttccccggcttcataccaagcctcctgggagatttgctcgaggagaggcagaagataaagcggaagatgaaggcaacggttgacccgctggagaagaaactcctcgattacaggcagaggttcatcaaaatcctcgccaacagcttctacggctactacggctacgccaaggcccggtggtactgcaaggagtgcgccgagagcgttacggcctggggaagggagtatatagaaatggttatccgggaactcgaagaaaaattcggttttaaagttctctatgccgatacagacggtctccatgctaccattcccggagcagacgctgaaacagtcaagaaaaaagcaaaggagttcttaaaatacattaatccaaaactgcccggcctgctcgaacttgagtacgagggcttctacgtgaggggcttcttcgtcacgaagaagaagtacgctgtgatagacgaggagggcaagataaccacgaggggtcttgagattgtgaggcgcgactggagcgagatagcgaaggagacccaggccagggtcttagaggcgatactcaagcacggtgacgtcgaggaggccgttaggatagtcaaggaagtgacggaaaagctgagcaagtatgaggtcccgcccgagaagctggtaatccacgagcagataacgcgcgatttgagggattacaaagccaccggcccgcacgttgccgttgcgaagaggctcgcggcgcgtggagtgaaaatccggcccggcacggtgataagctacatcgtcctaaagggctctggaaggataggcgacagggcgattccagctgatgagttcgacccgacgaagcaccgctacgatgcggaatactacatcgagaaccaggttctcccggcggtggagaggattctaaaagccttcggctatcggaaggaggatttgcgctaccagaagacgaagcaggtcggctcgggcgcgtggctgaaggtgaaggggaagaagggtaccgaagcttacgtagaacaaaaactcatctcagaagaggatctgaatagcgccgtcgaccatcatcatcatcatcattga

SEQ ID NO: 18 - protein, 802 aa, Artificial Sequence
  Description of Artificial Sequence:Thermococcus species 9degreesN-7 mutant DNA polymerase, 9degreesN mutant
MILDTDYITENGKPVIRVFKKENGEFKIEYDRTFEPYFYALLKDDSAIEDVKKVTAKRHGTVVKVKRAEKVQKKFLGRPIEVWKLYFNHPQDVPAIRDRIRAHPAVVDIYEYDIPFAKRYLIDKGLIPMEGDEELTMLAFAIATLYHEGEEFGTGPILMISYADGSEARVITWKKIDLPYVDVVSTEKEMIKRFLRVVREKDPDVLITYNGDNFDFAYLKKRCEELGIKFTLGRDGSEPKIQRMGDRFAVEVKGRIHFDLYPVIRRTINLPTYTLEAVYEAVFGKPKEKVYAEEIAQAWESGEGLERVARYSMEDAKVTYELGREFFPHEAQLSRLIGQSLWDVSRSSTGNLVEWFLLRKAYKRNELAPNKPDERELARRRGGYAGGYVKEPERGLWDNIVYLDFRSLYPSIIITHNVSPDTLNREGCKEYDVAPEVGHKFCKDFPGFIPSLLGDLLEERQKIKRKMKATVDPLEKKLLDYRQRFIKILANSFYGYYGYAKARWYCKECAESVTAWGREYIEMVIRELEEKFGFKVLYADTDGLHATIPGADAETVKKKAKEFLKYINPKLPGLLELEYEGFYVRGFFVTKKKYAVIDEEGKITTRGLEIVRRDWSEIAKETQARVLEAILKHGDVEEAVRIVKEVTEKLSKYEVPPEKLVIHEQITRDLRDYKATGPHVAVAKRLAARGVKIRPGTVISYIVLKGSGRIGDRAIPADEFDPTKHRYDAEYYIENQVLPAVERILKAFGYRKEDLRYQKTKQVGSGAWLKVKGKKGTEAYVEQKLISEEDLNSAVDHHHHHH

SEQ ID NO: 19 - DNA, 2409 bp, Artificial Sequence
  Description of Artificial Sequence:Thermococcus species 9degreesN-7 mutant DNA polymerase, 9degreesN mutant
atgattctcgataccgactacatcaccgagaacgggaagcccgtgataagggtcttcaagaaggagaacggcgagtttaaaatcgagtacgacagaaccttcgagccctacttctacgcccttctgaaggacgattctgcgatagaggacgtcaagaaggtaaccgcaaagaggcacggaacggttgtcaaggtgaagcgcgccgagaaggtgcagaagaagttcctcggcaggccgatagaggtctggaagctctacttcaaccatcctcaggacgtcccggcgattcgagacaggatacgcgcccaccccgctgtcgttgacatctacgagtacgacatacccttcgccaagcgctacctcatcgacaagggcctgattccgatggagggcgacgaggagcttacgatgctcgccttcgcgatcgcaaccctctatcacgagggcgaggagttcggaaccgggccgattctcatgataagctacgccgacgggagcgaggcgagggtgataacctggaagaagattgaccttccgtacgttgacgtcgtctcgaccgagaaggagatgattaagcgcttcctccgcgtcgtcagggagaaggaccccgacgtgctcatcacctacaacggcgacaacttcgacttcgcctacctgaagaagcgctgtgaggaactcggaataaagttcacactcggcagggacgggagcgagccgaagatacagcgaatgggcgaccgctttgccgttgaggtgaagggcaggattcacttcgacctctaccccgtcataaggcgcacgataaacctcccgacctacacccttgaggccgtttacgaggccgtctttggaaagcccaaggagaaggtttacgcagaggagatagcgcaggcctgggagagcggggagggccttgaaagggttgcaagatactcgatggaggacgctaaggtgacctacgagctgggaagggagttcttcccgacagaggcccagctttcgaggggtataggccagagcctctgggacgtctcgcgctcgagcaccggaaatttggtggagtggttcctcctgcggaaggcctacaagaggaacgagctcgccccaaacaagcccgacgagagggagctcgcgagacggcgcgggggctacgctggcgggtacgttaaggaaccagagcggggattgtgggacaacattgtgtatttagacttccgctcgctgtatccttcaatcatcataacccacaacgtctcgccggataccctcaaccgcgagggctgtaaagagtacgacgtcgcccctgaggttggacacaagttctgcaaggacttccccggcttcataccaagcctcctgggagatttgctcgaggagaggcagaagataaagcggaagatgaaggcaacggttgacccgctggagaagaaactcctcgattacaggcagaggcttataaaaatcctcgccaacagcttctacggctactacggctacgccaaggcccggtggtactgcaaggagtgcgccgagagcgttacggcctggggaagggagtatatagaaatggttatccgggaactcgaagaaaaattcggttttaaagttctctatgccgatacagacggtctccatgctaccattcccggagcagacgctgaaacagtcaagaaaaaagcaaaggagttcttaaaatacattaatccaaaactgcccggcctgctcgaacttgagtacgagggcttctacgtgaggggcttcttcgtcacgaagaagaagtacgctgtgatagacgaggagggcaagataaccacgaggggtcttgagattgtgaggcgcgactggagcgagatagcgaaggagacccaggccagggtcttagaggcgatactcaagcacggtgacgtcgaggaggccgttaggatagtcaaggaagtgacggaaaagctgagcaagtatgaggtcccgcccgagaagctggtaatccacgagcagataacgcgcgatttgagggattacaaagccaccggcccgcacgttgccgttgcgaagaggctcgcggcgcgtggagtgaaaatccggcccggcacggtgataagctacatcgtcctaaagggctctggaaggataggcgacagggcgattccagctgatgagttcgacccgacgaagcaccgctacgatgcggaatactacatcgagaaccaggttctcccggcggtggagaggattctaaaagccttcggctatcggaaggaggatttgcgctaccagaagacgaagcaggtcggctcgggcgcgtggctgaaggtgaaggggaagaagggtaccgaagcttacgtagaacaaaaactcatctcagaagaggatctgaatagcgccgtcgaccatcatcatcatcatcattga

SEQ ID NO: 20 - protein, 802 aa, Artificial Sequence
  Description of Artificial Sequence:Thermococcus species 9degreesN-7 mutant DNA polymerase, 9degreesN mutant
MILDTDYITENGKPVIRVFKKENGEFKIEYDRTFEPYFYALLKDDSAIEDVKKVTAKRHGTVVKVKRAEKVQKKFLGRPIEVWKLYFNHPQDVPAIRDRIRAHPAVVDIYEYDIPFAKRYLIDKGLIPMEGDEELTMLAFAIATLYHEGEEFGTGPILMISYADGSEARVITWKKIDLPYVDVVSTEKEMIKRFLRVVREKDPDVLITYNGDNFDFAYLKKRCEELGIKFTLGRDGSEPKIQRMGDRFAVEVKGRIHFDLYPVIRRTINLPTYTLEAVYEAVFGKPKEKVYAEEIAQAWESGEGLERVARYSMEDAKVTYELGREFFPTEAQLSRGIGQSLWDVSRSSTGNLVEWFLLRKAYKRNELAPNKPDERELARRRGGYAGGYVKEPERGLWDNIVYLDFRSLYPSIIITHNVSPDTLNREGCKEYDVAPEVGHKFCKDFPGFIPSLLGDLLEERQKIKRKMKATVDPLEKKLLDYRQRLIKILANSFYGYYGYAKARWYCKECAESVTAWGREYIEMVIRELEEKFGFKVLYADTDGLHATIPGADAETVKKKAKEFLKYINPKLPGLLELEYEGFYVRGFFVTKKKYAVIDEEGKITTRGLEIVRRDWSEIAKETQARVLEAILKHGDVEEAVRIVKEVTEKLSKYEVPPEKLVIHEQITRDLRDYKATGPHVAVAKRLAARGVKIRPGTVISYIVLKGSGRIGDRAIPADEFDPTKHRYDAEYYIENQVLPAVERILKAFGYRKEDLRYQKTKQVGSGAWLKVKGKKGTEAYVEQKLISEEDLNSAVDHHHHHH

SEQ ID NO: 21 - DNA, 2409 bp, Artificial Sequence
  Description of Artificial Sequence:Thermococcus species 9degreesN-7 mutant DNA polymerase, 9degreesN mutant
atgattctcgataccgactacatcaccgagaacgggaagcccgtgataagggtcttcaagaaggagaacggcgagtttaaaatcgagtacgacagaaccttcgagccctacttctacgcccttctgaaggacgattctgcgatagaggacgtcaagaaggtaaccgcaaagaggcacggaacggttgtcaaggtgaagcgcgccgagaaggtgcagaagaagttcctcggcaggccgatagaggtctggaagctctacttcaaccatcctcaggacgtcccggcgattcgagacaggatacgcgcccaccccgctgtcgttgacatctacgagtacgacatacccttcgccaagcgctacctcatcgacaagggcctgattccgatggagggcgacgaggagcttacgatgctcgccttcgcgatcgcaaccctctatcacgagggcgaggagttcggaaccgggccgattctcatgataagctacgccgacgggagcgaggcgagggtgataacctggaagaagattgaccttccgtacgttgacgtcgtctcgaccgagaaggagatgattaagcgcttcctccgcgtcgtcagggagaaggaccccgacgtgctcatcacctacaacggcgacaacttcgacttcgcctacctgaagaagcgctgtgaggaactcggaataaagttcacactcggcagggacgggagcgagccgaagatacagcgaatgggcgaccgctttgccgttgaggtgaagggcaggattcacttcgacctctaccccgtcataaggcgcacgataaacctcccgacctacacccttgaggccgtttacgaggccgtctttggaaagcccaaggagaaggtttacgcagaggagatagcgcaggcctgggagagcggggagggccttgaaagggttgcaagatactcgatggaggacgctaaggtgacctacgagctgggaagggagttcttcccggttgaggcccagctttcgagggcgataggccagagcctctgggacgtctcgcgctcgagcaccggaaatttggtggagtggttcctcctgcggaaggcctacaagaggaacgagctcgccccaaacaagcccgacgagagggagctcgcgagacggcgcgggggctacgctggcgggtacgttaaggaaccagagcggggattgtgggacaacattgtgtatttagacttccgctcgctgtatccttcaatcatcataacccacaacgtctcgccggataccctcaaccgcgagggctgtaaagagtacgacgtcgcccctgaggttggacacaagttctgcaaggacttccccggcttcataccaagcctcctgggagatttgctcgaggagaggcagaagataaagcggaagatgaaggcaacggttgacccgctggagaagaaactcctcgattacaggcagaggcttataaaaatcctcgccaacagcttctacggctactacggctacgccaaggcccggtggtactgcaaggagtgcgccgagagcgttacggcctggggaagggagtatatagaaatggttatccgggaactcgaagaaaaattcggttttaaagttctctatgccgatacagacggtctccatgctaccattcccggagcagacgctgaaacagtcaagaaaaaagcaaaggagttcttaaaatacattaatccaaaactgcccggcctgctcgaacttgagtacgagggcttctacgtgaggggcttcttcgtcacgaagaagaagtacgctgtgatagacgaggagggcaagataaccacgaggggtcttgagattgtgaggcgcgactggagcgagatagcgaaggagacccaggccagggtcttagaggcgatactcaagcacggtgacgtcgaggaggccgttaggatagtcaaggaagtgacggaaaagctgagcaagtatgaggtcccgcccgagaagctggtaatccacgagcagataacgcgcgatttgagggattacaaagccaccggcccgcacgttgccgttgcgaagaggctcgcggcgcgtggagtgaaaatccggcccggcacggtgataagctacatcgtcctaaagggctctggaaggataggcgacagggcgattccagctgatgagttcgacccgacgaagcaccgctacgatgcggaatactacatcgagaaccaggttctcccggcggtggagaggattctaaaagccttcggctatcggaaggaggatttgcgctaccagaagacgaagcaggtcggctcgggcgcgtggctgaaggtgaaggggaagaagggtaccgaagcttacgtagaacaaaaactcatctcagaagaggatctgaatagcgccgtcgaccatcatcatcatcatcattga

SEQ ID NO: 22 - protein, 802 aa, Artificial Sequence
  Description of Artificial Sequence:Thermococcus species 9degreesN-7 mutant DNA polymerase, 9degreesN mutant
MILDTDYITENGKPVIRVFKKENGEFKIEYDRTFEPYFYALLKDDSAIEDVKKVTAKRHGTVVKVKRAEKVQKKFLGRPIEVWKLYFNHPQDVPAIRDRIRAHPAVVDIYEYDIPFAKRYLIDKGLIPMEGDEELTMLAFAIATLYHEGEEFGTGPILMISYADGSEARVITWKKIDLPYVDVVSTEKEMIKRFLRVVREKDPDVLITYNGDNFDFAYLKKRCEELGIKFTLGRDGSEPKIQRMGDRFAVEVKGRIHFDLYPVIRRTINLPTYTLEAVYEAVFGKPKEKVYAEEIAQAWESGEGLERVARYSMEDAKVTYELGREFFPVEAQLSRAIGQSLWDVSRSSTGNLVEWFLLRKAYKRNELAPNKPDERELARRRGGYAGGYVKEPERGLWDNIVYLDFRSLYPSIIITHNVSPDTLNREGCKEYDVAPEVGHKFCKDFPGFIPSLLGDLLEERQKIKRKMKATVDPLEKKLLDYRQRLIKILANSFYGYYGYAKARWYCKECAESVTAWGREYIEMVIRELEEKFGFKVLYADTDGLHATIPGADAETVKKKAKEFLKYINPKLPGLLELEYEGFYVRGFFVTKKKYAVIDEEGKITTRGLEIVRRDWSEIAKETQARVLEAILKHGDVEEAVRIVKEVTEKLSKYEVPPEKLVIHEQITRDLRDYKATGPHVAVAKRLAARGVKIRPGTVISYIVLKGSGRIGDRAIPADEFDPTKHRYDAEYYIENQVLPAVERILKAFGYRKEDLRYQKTKQVGSGAWLKVKGKKGTEAYVEQKLISEEDLNSAVDHHHHHH

SEQ ID NO: 23 - DNA, 2409 bp, Artificial Sequence
  Description of Artificial Sequence:Thermococcus species 9degreesN-7 mutant DNA polymerase, 9degreesN mutant
atgattctcgataccgactacatcaccgagaacgggaagcccgtgataagggtcttcaagaaggagaacggcgagtttaaaatcgagtacgacagaaccttcgagccctacttctacgcccttctgaaggacgattctgcgatagaggacgtcaagaaggtaaccgcaaagaggcacggaacggttgtcaaggtgaagcgcgccgagaaggtgcagaagaagttcctcggcaggccgatagaggtctggaagctctacttcaaccatcctcaggacgtcccggcgattcgagacaggatacgcgcccaccccgctgtcgttgacatctacgagtacgacatacccttcgccaagcgctacctcatcgacaagggcctgattccgatggagggcgacgaggagcttacgatgctcgccttcgcgatcgcaaccctctatcacgagggcgaggagttcggaaccgggccgattctcatgataagctacgccgacgggagcgaggcgagggtgataacctggaagaagattgaccttccgtacgttgacgtcgtctcgaccgagaaggagatgattaagcgcttcctccgcgtcgtcagggagaaggaccccgacgtgctcatcacctacaacggcgacaacttcgacttcgcctacctgaagaagcgctgtgaggaactcggaataaagttcacactcggcagggacgggagcgagccgaagatacagcgaatgggcgaccgctttgccgttgaggtgaagggcaggattcacttcgacctctaccccgtcataaggcgcacgataaacctcccgacctacacccttgaggccgtttacgaggccgtctttggaaagcccaaggagaaggtttacgcagaggagatagcgcaggcctgggagagcggggagggccttgaaagggttgcaagatactcgatggaggacgctaaggtgacctacgagctgggaagggagttcttcccgattgaggcccagctttcgaggagtataggccagagcctctgggacgtctcgcgctcgagcaccggaaatttggtggagtggttcctcctgcggaaggcctacaagaggaacgagctcgccccaaacaagcccgacgagagggagctcgcgagacggcgcgggggctacgctggcgggtacgttaaggaaccagagcggggattgtgggacaacattgtgtatttagacttccgctcgctgtatccttcaatcatcataacccacaacgtctcgccggataccctcaaccgcgagggctgtaaagagtacgacgtcgcccctgaggttggacacaagttctgcaaggacttccccggcttcataccaagcctcctgggagatttgctcgaggagaggcagaagataaagcggaagatgaaggcaacggttgacccgctggagaagaaactcctcgattacaggcagaggcttataaaaatcctcgccaacagcttctacggctactacggctacgccaaggcccggtggtactgcaaggagtgcgccgagagcgttacggcctggggaagggagtatatagaaatggttatccgggaactcgaagaaaaattcggttttaaagttctctatgccgatacagacggtctccatgctaccattcccggagcagacgctgaaacagtcaagaaaaaagcaaaggagttcttaaaatacattaatccaaaactgcccggcctgctcgaacttgagtacgagggcttctacgtgaggggcttcttcgtcacgaagaagaagtacgctgtgatagacgaggagggcaagataaccacgaggggtcttgagattgtgaggcgcgactggagcgagatagcgaaggagacccaggccagggtcttagaggcgatactcaagcacggtgacgtcgaggaggccgttaggatagtcaaggaagtgacggaaaagctgagcaagtatgaggtcccgcccgagaagctggtaatccacgagcagataacgcgcgatttgagggattacaaagccaccggcccgcacgttgccgttgcgaagaggctcgcggcgcgtggagtgaaaatccggcccggcacggtgataagctacatcgtcctaaagggctctggaaggataggcgacagggcgattccagctgatgagttcgacccgacgaagcaccgctacgatgcggaatactacatcgagaaccaggttctcccggcggtggagaggattctaaaagccttcggctatcggaaggaggatttgcgctaccagaagacgaagcaggtcggctcgggcgcgtggctgaaggtgaaggggaagaagggtaccgaagcttacgtagaacaaaaactcatctcagaagaggatctgaatagcgccgtcgaccatcatcatcatcatcattga

SEQ ID NO: 24 - protein, 802 aa, Artificial Sequence
  Description of Artificial Sequence:Thermococcus species 9degreesN-7 mutant DNA polymerase, 9degreesN mutant
MILDTDYITENGKPVIRVFKKENGEFKIEYDRTFEPYFYALLKDDSAIEDVKKVTAKRHGTVVKVKRAEKVQKKFLGRPIEVWKLYFNHPQDVPAIRDRIRAHPAVVDIYEYDIPFAKRYLIDKGLIPMEGDEELTMLAFAIATLYHEGEEFGTGPILMISYADGSEARVITWKKIDLPYVDVVSTEKEMIKRFLRVVREKDPDVLITYNGDNFDFAYLKKRCEELGIKFTLGRDGSEPKIQRMGDRFAVEVKGRIHFDLYPVIRRTINLPTYTLEAVYEAVFGKPKEKVYAEEIAQAWESGEGLERVARYSMEDAKVTYELGREFFPIEAQLSRSIGQSLWDVSRSSTGNLVEWFLLRKAYKRNELAPNKPDERELARRRGGYAGGYVKEPERGLWDNIVYLDFRSLYPSIIITHNVSPDTLNREGCKEYDVAPEVGHKFCKDFPGFIPSLLGDLLEERQKIKRKMKATVDPLEKKLLDYRQRLIKILANSFYGYYGYAKARWYCKECAESVTAWGREYIEMVIRELEEKFGFKVLYADTDGLHATIPGADAETVKKKAKEFLKYINPKLPGLLELEYEGFYVRGFFVTKKKYAVIDEEGKITTRGLEIVRRDWSEIAKETQARVLEAILKHGDVEEAVRIVKEVTEKLSKYEVPPEKLVIHEQITRDLRDYKATGPHVAVAKRLAARGVKIRPGTVISYIVLKGSGRIGDRAIPADEFDPTKHRYDAEYYIENQVLPAVERILKAFGYRKEDLRYQKTKQVGSGAWLKVKGKKGTEAYVEQKLISEEDLNSAVDHHHHHH

SEQ ID NO: 25 - DNA, 2409 bp, Artificial Sequence
  Description of Artificial Sequence:Thermococcus species 9degreesN-7 mutant DNA polymerase, 9degreesN mutant
atgattctcgataccgactacatcaccgagaacgggaagcccgtgataagggtcttcaagaaggagaacggcgagtttaaaatcgagtacgacagaaccttcgagccctacttctacgcccttctgaaggacgattctgcgatagaggacgtcaagaaggtaaccgcaaagaggcacggaacggttgtcaaggtgaagcgcgccgagaaggtgcagaagaagttcctcggcaggccgatagaggtctggaagctctacttcaaccatcctcaggacgtcccggcgattcgagacaggatacgcgcccaccccgctgtcgttgacatctacgagtacgacatacccttcgccaagcgctacctcatcgacaagggcctgattccgatggagggcgacgaggagcttacgatgctcgccttcgcgatcgcaaccctctatcacgagggcgaggagttcggaaccgggccgattctcatgataagctacgccgacgggagcgaggcgagggtgataacctggaagaagattgaccttccgtacgttgacgtcgtctcgaccgagaaggagatgattaagcgcttcctccgcgtcgtcagggagaaggaccccgacgtgctcatcacctacaacggcgacaacttcgacttcgcctacctgaagaagcgctgtgaggaactcggaataaagttcacactcggcagggacgggagcgagccgaagatacagcgaatgggcgaccgctttgccgttgaggtgaagggcaggattcacttcgacctctaccccgtcataaggcgcacgataaacctcccgacctacacccttgaggccgtttacgaggccgtctttggaaagcccaaggagaaggtttacgcagaggagatagcgcaggcctgggagagcggggagggccttgaaagggttgcaagatactcgatggaggacgctaaggtgacctacgagctgggaagggagttcttcccgacagaggcccagctttcgaggacaataggccagagcctctgggacgtctcgcgctcgagcaccggaaatttggtggagtggttcctcctgcggaaggcctacaagaggaacgagctcgccccaaacaagcccgacgagagggagctcgcgagacggcgcgggggctacgctggcgggtacgttaaggaaccagagcggggattgtgggacaacattgtgtatttagacttccgctcgctgtatccttcaatcatcataacccacaacgtctcgccggataccctcaaccgcgagggctgtaaagagtacgacgtcgcccctgaggttggacacaagttctgcaaggacttccccggcttcataccaagcctcctgggagatttgctcgaggagaggcagaagataaagcggaagatgaaggcaacggttgacccgctggagaagaaactcctcgattacaggcagaggcttataaaaatcctcgccaacagcttctacggctactacggctacgccaaggcccggtggtactgcaaggagtgcgccgagagcgttacggcctggggaagggagtatatagaaatggttatccgggaactcgaagaaaaattcggttttaaagttctctatgccgatacagacggtctccatgctaccattcccggagcagacgctgaaacagtcaagaaaaaagcaaaggagttcttaaaatacattaatccaaaactgcccggcctgctcgaacttgagtacgagggcttctacgtgaggggcttcttcgtcacgaagaagaagtacgctgtgatagacgaggagggcaagataaccacgaggggtcttgagattgtgaggcgcgactggagcgagatagcgaaggagacccaggccagggtcttagaggcgatactcaagcacggtgacgtcgaggaggccgttaggatagtcaaggaagtgacggaaaagctgagcaagtatgaggtcccgcccgagaagctggtaatccacgagcagataacgcgcgatttgagggattacaaagccaccggcccgcacgttgccgttgcgaagaggctcgcggcgcgtggagtgaaaatccggcccggcacggtgataagctacatcgtcctaaagggctctggaaggataggcgacagggcgattccagctgatgagttcgacccgacgaagcaccgctacgatgcggaatactacatcgagaaccaggttctcccggcggtggagaggattctaaaagccttcggctatcggaaggaggatttgcgctaccagaagacgaagcaggtcggctcgggcgcgtggctgaaggtgaaggggaagaagggtaccgaagcttacgtagaacaaaaactcatctcagaagaggatctgaatagcgccgtcgaccatcatcatcatcatcattga

SEQ ID NO: 26 - protein, 802 aa, Artificial Sequence
  Description of Artificial Sequence:Thermococcus species 9degreesN-7 mutant DNA polymerase, 9degreesN mutant
MILDTDYITENGKPVIRVFKKENGEFKIEYDRTFEPYFYALLKDDSAIEDVKKVTAKRHGTVVKVKRAEKVQKKFLGRPIEVWKLYFNHPQDVPAIRDRIRAHPAVVDIYEYDIPFAKRYLIDKGLIPMEGDEELTMLAFAIATLYHEGEEFGTGPILMISYADGSEARVITWKKIDLPYVDVVSTEKEMIKRFLRVVREKDPDVLITYNGDNFDFAYLKKRCEELGIKFTLGRDGSEPKIQRMGDRFAVEVKGRIHFDLYPVIRRTINLPTYTLEAVYEAVFGKPKEKVYAEEIAQAWESGEGLERVARYSMEDAKVTYELGREFFPTEAQLSRTIGQSLWDVSRSSTGNLVEWFLLRKAYKRNELAPNKPDERELARRRGGYAGGYVKEPERGLWDNIVYLDFRSLYPSIIITHNVSPDTLNREGCKEYDVAPEVGHKFCKDFPGFIPSLLGDLLEERQKIKRKMKATVDPLEKKLLDYRQRLIKILANSFYGYYGYAKARWYCKECAESVTAWGREYIEMVIRELEEKFGFKVLYADTDGLHATIPGADAETVKKKAKEFLKYINPKLPGLLELEYEGFYVRGFFVTKKKYAVIDEEGKITTRGLEIVRRDWSEIAKETQARVLEAILKHGDVEEAVRIVKEVTEKLSKYEVPPEKLVIHEQITRDLRDYKATGPHVAVAKRLAARGVKIRPGTVISYIVLKGSGRIGDRAIPADEFDPTKHRYDAEYYIENQVLPAVERILKAFGYRKEDLRYQKTKQVGSGAWLKVKGKKGTEAYVEQKLISEEDLNSAVDHHHHHH

SEQ ID NO: 27 - DNA, 2409 bp, Artificial Sequence
  Description of Artificial Sequence:Thermococcus species 9degreesN-7 mutant DNA polymerase, 9degreesN mutant
atgattctcgataccgactacatcaccgagaacgggaagcccgtgataagggtcttcaagaaggagaacggcgagtttaaaatcgagtacgacagaaccttcgagccctacttctacgcccttctgaaggacgattctgcgatagaggacgtcaagaaggtaaccgcaaagaggcacggaacggttgtcaaggtgaagcgcgccgagaaggtgcagaagaagttcctcggcaggccgatagaggtctggaagctctacttcaaccatcctcaggacgtcccggcgattcgagacaggatacgcgcccaccccgctgtcgttgacatctacgagtacgacatacccttcgccaagcgctacctcatcgacaagggcctgattccgatggagggcgacgaggagcttacgatgctcgccttcgcgatcgcaaccctctatcacgagggcgaggagttcggaaccgggccgattctcatgataagctacgccgacgggagcgaggcgagggtgataacctggaagaagattgaccttccgtacgttgacgtcgtctcgaccgagaaggagatgattaagcgcttcctccgcgtcgtcagggagaaggaccccgacgtgctcatcacctacaacggcgacaacttcgacttcgcctacctgaagaagcgctgtgaggaactcggaataaagttcacactcggcagggacgggagcgagccgaagatacagcgaatgggcgaccgctttgccgttgaggtgaagggcaggattcacttcgacctctaccccgtcataaggcgcacgataaacctcccgacctacacccttgaggccgtttacgaggccgtctttggaaagcccaaggagaaggtttacgcagaggagatagcgcaggcctgggagagcggggagggccttgaaagggttgcaagatactcgatggaggacgctaaggtgacctacgagctgggaagggagttcttcccggtcgaagcccagctttcgaggtcgataggccagagcctctgggacgtctcgcgctcgagcaccggaaatttggtggagtggttcctcctgcggaaggcctacaagaggaacgagctcgccccaaacaagcccgacgagagggagctcgcgagacggcgcgggggctacgctggcgggtacgttaaggaaccagagcggggattgtgggacaacattgtgtatttagacttccgctcgctgtatccttcaatcatcataacccacaacgtctcgccggataccctcaaccgcgagggctgtaaagagtacgacgtcgcccctgaggttggacacaagttctgcaaggacttccccggcttcataccaagcctcctgggagatttgctcgaggagaggcagaagataaagcggaagatgaaggcaacggttgacccgctggagaagaaactcctcgattacaggcagaggcttataaaaatcctcgccaacagcttctacggctactacggctacgccaaggcccggtggtactgcaaggagtgcgccgagagcgttacggcctggggaagggagtatatagaaatggttatccgggaactcgaagaaaaattcggttttaaagttctctatgccgatacagacggtctccatgctaccattcccggagcagacgctgaaacagtcaagaaaaaagcaaaggagttcttaaaatacattaatccaaaactgcccggcctgctcgaacttgagtacgagggcttctacgtgaggggcttcttcgtcacgaagaagaagtacgctgtgatagacgaggagggcaagataaccacgaggggtcttgagattgtgaggcgcgactggagcgagatagcgaaggagacccaggccagggtcttagaggcgatactcaagcacggtgacgtcgaggaggccgttaggatagtcaaggaagtgacggaaaagctgagcaagtatgaggtcccgcccgagaagctggtaatccacgagcagataacgcgcgatttgagggattacaaagccaccggcccgcacgttgccgttgcgaagaggctcgcggcgcgtggagtgaaaatccggcccggcacggtgataagctacatcgtcctaaagggctctggaaggataggcgacagggcgattccagctgatgagttcgacccgacgaagcaccgctacgatgcggaatactacatcgagaaccaggttctcccggcggtggagaggattctaaaagccttcggctatcggaaggaggatttgcgctaccagaagacgaagcaggtcggctcgggcgcgtggctgaaggtgaaggggaagaagggtaccgaagcttacgtagaacaaaaactcatctcagaagaggatctgaatagcgccgtcgaccatcatcatcatcatcattga

SEQ ID NO: 28 - protein, 802 aa, Artificial Sequence
  Description of Artificial Sequence:Thermococcus species 9degreesN-7 mutant DNA polymerase, 9degreesN mutant
MILDTDYITENGKPVIRVFKKENGEFKIEYDRTFEPYFYALLKDDSAIEDVKKVTAKRHGTVVKVKRAEKVQKKFLGRPIEVWKLYFNHPQDVPAIRDRIRAHPAVVDIYEYDIPFAKRYLIDKGLIPMEGDEELTMLAFAIATLYHEGEEFGTGPILMISYADGSEARVITWKKIDLPYVDVVSTEKEMIKRFLRVVREKDPDVLITYNGDNFDFAYLKKRCEELGIKFTLGRDGSEPKIQRMGDRFAVEVKGRIHFDLYPVIRRTINLPTYTLEAVYEAVFGKPKEKVYAEEIAQAWESGEGLERVARYSMEDAKVTYELGREFFPVEAQLSRSIGQSLWDVSRSSTGNLVEWFLLRKAYKRNELAPNKPDERELARRRGGYAGGYVKEPERGLWDNIVYLDFRSLYPSIIITHNVSPDTLNREGCKEYDVAPEVGHKFCKDFPGFIPSLLGDLLEERQKIKRKMKATVDPLEKKLLDYRQRLIKILANSFYGYYGYAKARWYCKECAESVTAWGREYIEMVIRELEEKFGFKVLYADTDGLHATIPGADAETVKKKAKEFLKYINPKLPGLLELEYEGFYVRGFFVTKKKYAVIDEEGKITTRGLEIVRRDWSEIAKETQARVLEAILKHGDVEEAVRIVKEVTEKLSKYEVPPEKLVIHEQITRDLRDYKATGPHVAVAKRLAARGVKIRPGTVISYIVLKGSGRIGDRAIPADEFDPTKHRYDAEYYIENQVLPAVERILKAFGYRKEDLRYQKTKQVGSGAWLKVKGKKGTEAYVEQKLISEEDLNSAVDHHHHHH

SEQ ID NO: 29 - DNA, 2409 bp, Artificial Sequence
  Description of Artificial Sequence:Thermococcus species 9degreesN-7 mutant DNA polymerase, 9degreesN mutant
atgattctcgataccgactacatcaccgagaacgggaagcccgtgataagggtcttcaagaaggagaacggcgagtttaaaatcgagtacgacagaaccttcgagccctacttctacgcccttctgaaggacgattctgcgatagaggacgtcaagaaggtaaccgcaaagaggcacggaacggttgtcaaggtgaagcgcgccgagaaggtgcagaagaagttcctcggcaggccgatagaggtctggaagctctacttcaaccatcctcaggacgtcccggcgattcgagacaggatacgcgcccaccccgctgtcgttgacatctacgagtacgacatacccttcgccaagcgctacctcatcgacaagggcctgattccgatggagggcgacgaggagcttacgatgctcgccttcgcgatcgcaaccctctatcacgagggcgaggagttcggaaccgggccgattctcatgataagctacgccgacgggagcgaggcgagggtgataacctggaagaagattgaccttccgtacgttgacgtcgtctcgaccgagaaggagatgattaagcgcttcctccgcgtcgtcagggagaaggaccccgacgtgctcatcacctacaacggcgacaacttcgacttcgcctacctgaagaagcgctgtgaggaactcggaataaagttcacactcggcagggacgggagcgagccgaagatacagcgaatgggcgaccgctttgccgttgaggtgaagggcaggattcacttcgacctctaccccgtcataaggcgcacgataaacctcccgacctacacccttgaggccgtttacgaggccgtctttggaaagcccaaggagaaggtttacgcagaggagatagcgcaggcctgggagagcggggagggccttgaaagggttgcaagatactcgatggaggacgctaaggtgacctacgagctgggaagggagttcttcccgcctgaggcccagctttcgaggcgtataggccagagcctctgggacgtctcgcgctcgagcaccggaaatttggtggagtggttcctcctgcggaaggcctacaagaggaacgagctcgccccaaacaagcccgacgagagggagctcgcgagacggcgcgggggctacgctggcgggtacgttaaggaaccagagcggggattgtgggacaacattgtgtatttagacttccgctcgctgtatccttcaatcatcataacccacaacgtctcgccggataccctcaaccgcgagggctgtaaagagtacgacgtcgcccctgaggttggacacaagttctgcaaggacttccccggcttcataccaagcctcctgggagatttgctcgaggagaggcagaagataaagcggaagatgaaggcaacggttgacccgctggagaagaaactcctcgattacaggcagaggcttataaaaatcctcgccaacagcttctacggctactacggctacgccaaggcccggtggtactgcaaggagtgcgccgagagcgttacggcctggggaagggagtatatagaaatggttatccgggaactcgaagaaaaattcggttttaaagttctctatgccgatacagacggtctccatgctaccattcccggagcagacgctgaaacagtcaagaaaaaagcaaaggagttcttaaaatacattaatccaaaactgcccggcctgctcgaacttgagtacgagggcttctacgtgaggggcttcttcgtcacgaagaagaagtacgctgtgatagacgaggagggcaagataaccacgaggggtcttgagattgtgaggcgcgactggagcgagatagcgaaggagacccaggccagggtcttagaggcgatactcaagcacggtgacgtcgaggaggccgttaggatagtcaaggaagtgacggaaaagctgagcaagtatgaggtcccgcccgagaagctggtaatccacgagcagataacgcgcgatttgagggattacaaagccaccggcccgcacgttgccgttgcgaagaggctcgcggcgcgtggagtgaaaatccggcccggcacggtgataagctacatcgtcctaaagggctctggaaggataggcgacagggcgattccagctgatgagttcgacccgacgaagcaccgctacgatgcggaatactacatcgagaaccaggttctcccggcggtggagaggattctaaaagccttcggctatcggaaggaggatttgcgctaccagaagacgaagcaggtcggctcgggcgcgtggctgaaggtgaaggggaagaagggtaccgaagcttacgtagaacaaaaactcatctcagaagaggatctgaatagcgccgtcgaccatcatcatcatcatcattga

SEQ ID NO: 30 - protein, 802 aa, Artificial Sequence
  Description of Artificial Sequence:Thermococcus species 9degreesN-7 mutant DNA polymerase, 9degreesN mutant
MILDTDYITENGKPVIRVFKKENGEFKIEYDRTFEPYFYALLKDDSAIEDVKKVTAKRHGTVVKVKRAEKVQKKFLGRPIEVWKLYFNHPQDVPAIRDRIRAHPAVVDIYEYDIPFAKRYLIDKGLIPMEGDEELTMLAFAIATLYHEGEEFGTGPILMISYADGSEARVITWKKIDLPYVDVVSTEKEMIKRFLRVVREKDPDVLITYNGDNFDFAYLKKRCEELGIKFTLGRDGSEPKIQRMGDRFAVEVKGRIHFDLYPVIRRTINLPTYTLEAVYEAVFGKPKEKVYAEEIAQAWESGEGLERVARYSMEDAKVTYELGREFFPPEAQLSRRIGQSLWDVSRSSTGNLVEWFLLRKAYKRNELAPNKPDERELARRRGGYAGGYVKEPERGLWDNIVYLDFRSLYPSIIITHNVSPDTLNREGCKEYDVAPEVGHKFCKDFPGFIPSLLGDLLEERQKIKRKMKATVDPLEKKLLDYRQRLIKILANSFYGYYGYAKARWYCKECAESVTAWGREYIEMVIRELEEKFGFKVLYADTDGLHATIPGADAETVKKKAKEFLKYINPKLPGLLELEYEGFYVRGFFVTKKKYAVIDEEGKITTRGLEIVRRDWSEIAKETQARVLEAILKHGDVEEAVRIVKEVTEKLSKYEVPPEKLVIHEQITRDLRDYKATGPHVAVAKRLAARGVKIRPGTVISYIVLKGSGRIGDRAIPADEFDPTKHRYDAEYYIENQVLPAVERILKAFGYRKEDLRYQKTKQVGSGAWLKVKGKKGTEAYVEQKLISEEDLNSAVDHHHHHH

SEQ ID NO: 31 - DNA, 2409 bp, Artificial Sequence
  Description of Artificial Sequence:Thermococcus species 9degreesN-7 mutant DNA polymerase, 9degreesN mutant
atgattctcgataccgactacatcaccgagaacgggaagcccgtgataagggtcttcaagaaggagaacggcgagtttaaaatcgagtacgacagaaccttcgagccctacttctacgcccttctgaaggacgattctgcgatagaggacgtcaagaaggtaaccgcaaagaggcacggaacggttgtcaaggtgaagcgcgccgagaaggtgcagaagaagttcctcggcaggccgatagaggtctggaagctctacttcaaccatcctcaggacgtcccggcgattcgagacaggatacgcgcccaccccgctgtcgttgacatctacgagtacgacatacccttcgccaagcgctacctcatcgacaagggcctgattccgatggagggcgacgaggagcttacgatgctcgccttcgcgatcgcaaccctctatcacgagggcgaggagttcggaaccgggccgattctcatgataagctacgccgacgggagcgaggcgagggtgataacctggaagaagattgaccttccgtacgttgacgtcgtctcgaccgagaaggagatgattaagcgcttcctccgcgtcgtcagggagaaggaccccgacgtgctcatcacctacaacggcgacaacttcgacttcgcctacctgaagaagcgctgtgaggaactcggaataaagttcacactcggcagggacgggagcgagccgaagatacagcgaatgggcgaccgctttgccgttgaggtgaagggcaggattcacttcgacctctaccccgtcataaggcgcacgataaacctcccgacctacacccttgaggccgtttacgaggccgtctttggaaagcccaaggagaaggtttacgcagaggagatagcgcaggcctgggagagcggggagggccttgaaagggttgcaagatactcgatggaggacgctaaggtgacctacgagctgggaagggagttcttcccggaggaggcccagctttcgaggtggataggccagagcctctgggacgtctcgcgctcgagcaccggaaatttggtggagtggttcctcctgcggaaggcctacaagaggaacgagctcgccccaaacaagcccgacgagagggagctcgcgagacggcgcgggggctacgctggcgggtacgttaaggaaccagagcggggattgtgggacaacattgtgtatttagacttccgctcgctgtatccttcaatcatcataacccacaacgtctcgccggataccctcaaccgcgagggctgtaaagagtacgacgtcgcccctgaggttggacacaagttctgcaaggacttccccggcttcataccaagcctcctgggagatttgctcgaggagaggcagaagataaagcggaagatgaaggcaacggttgacccgctggagaagaaactcctcgattacaggcagaggcttataaaaatcctcgccaacagcttctacggctactacggctacgccaaggcccggtggtactgcaaggagtgcgccgagagcgttacggcctggggaagggagtatatagaaatggttatccgggaactcgaagaaaaattcggttttaaagttctctatgccgatacagacggtctccatgctaccattcccggagcagacgctgaaacagtcaagaaaaaagcaaaggagttcttaaaatacattaatccaaaactgcccggcctgctcgaacttgagtacgagggcttctacgtgaggggcttcttcgtcacgaagaagaagtacgctgtgatagacgaggagggcaagataaccacgaggggtcttgagattgtgaggcgcgactggagcgagatagcgaaggagacccaggccagggtcttagaggcgatactcaagcacggtgacgtcgaggaggccgttaggatagtcaaggaagtgacggaaaagctgagcaagtatgaggtcccgcccgagaagctggtaatccacgagcagataacgcgcgatttgagggattacaaagccaccggcccgcacgttgccgttgcgaagaggctcgcggcgcgtggagtgaaaatccggcccggcacggtgataagctacatcgtcctaaagggctctggaaggataggcgacagggcgattccagctgatgagttcgacccgacgaagcaccgctacgatgcggaatactacatcgagaaccaggttctcccggcggtggagaggattctaaaagccttcggctatcggaaggaggatttgcgctaccagaagacgaagcaggtcggctcgggcgcgtggctgaaggtgaaggggaagaagggtaccgaagcttacgtagaacaaaaactcatctcagaagaggatctgaatagcgccgtcgaccatcatcatcatcatcattga

SEQ ID NO: 32 - protein, 802 aa, Artificial Sequence
  Description of Artificial Sequence:Thermococcus species 9degreesN-7 mutant DNA polymerase, 9degreesN mutant
MILDTDYITENGKPVIRVFKKENGEFKIEYDRTFEPYFYALLKDDSAIEDVKKVTAKRHGTVVKVKRAEKVQKKFLGRPIEVWKLYFNHPQDVPAIRDRIRAHPAVVDIYEYDIPFAKRYLIDKGLIPMEGDEELTMLAFAIATLYHEGEEFGTGPILMISYADGSEARVITWKKIDLPYVDVVSTEKEMIKRFLRVVREKDPDVLITYNGDNFDFAYLKKRCEELGIKFTLGRDGSEPKIQRMGDRFAVEVKGRIHFDLYPVIRRTINLPTYTLEAVYEAVFGKPKEKVYAEEIAQAWESGEGLERVARYSMEDAKVTYELGREFFPEEAQLSRWIGQSLWDVSRSSTGNLVEWFLLRKAYKRNELAPNKPDERELARRRGGYAGGYVKEPERGLWDNIVYLDFRSLYPSIIITHNVSPDTLNREGCKEYDVAPEVGHKFCKDFPGFIPSLLGDLLEERQKIKRKMKATVDPLEKKLLDYRQRLIKILANSFYGYYGYAKARWYCKECAESVTAWGREYIEMVIRELEEKFGFKVLYADTDGLHATIPGADAETVKKKAKEFLKYINPKLPGLLELEYEGFYVRGFFVTKKKYAVIDEEGKITTRGLEIVRRDWSEIAKETQARVLEAILKHGDVEEAVRIVKEVTEKLSKYEVPPEKLVIHEQITRDLRDYKATGPHVAVAKRLAARGVKIRPGTVISYIVLKGSGRIGDRAIPADEFDPTKHRYDAEYYIENQVLPAVERILKAFGYRKEDLRYQKTKQVGSGAWLKVKGKKGTEAYVEQKLISEEDLNSAVDHHHHHH

SEQ ID NO: 33 - DNA, 2409 bp, Artificial Sequence
  Description of Artificial Sequence:Thermococcus species 9degreesN-7 mutant DNA polymerase, 9degreesN mutant
atgattctcgataccgactacatcaccgagaacgggaagcccgtgataagggtcttcaagaaggagaacggcgagtttaaaatcgagtacgacagaaccttcgagccctacttctacgcccttctgaaggacgattctgcgatagaggacgtcaagaaggtaaccgcaaagaggcacggaacggttgtcaaggtgaagcgcgccgagaaggtgcagaagaagttcctcggcaggccgatagaggtctggaagctctacttcaaccatcctcaggacgtcccggcgattcgagacaggatacgcgcccaccccgctgtcgttgacatctacgagtacgacatacccttcgccaagcgctacctcatcgacaagggcctgattccgatggagggcgacgaggagcttacgatgctcgccttcgcgatcgcaaccctctatcacgagggcgaggagttcggaaccgggccgattctcatgataagctacgccgacgggagcgaggcgagggtgataacctggaagaagattgaccttccgtacgttgacgtcgtctcgaccgagaaggagatgattaagcgcttcctccgcgtcgtcagggagaaggaccccgacgtgctcatcacctacaacggcgacaacttcgacttcgcctacctgaagaagcgctgtgaggaactcggaataaagttcacactcggcagggacgggagcgagccgaagatacagcgaatgggcgaccgctttgccgttgaggtgaagggcaggattcacttcgacctctaccccgtcataaggcgcacgataaacctcccgacctacacccttgaggccgtttacgaggccgtctttggaaagcccaaggagaaggtttacgcagaggagatagcgcaggcctgggagagcggggagggccttgaaagggttgcaagatactcgatggaggacgctaaggtgacctacgagctgggaagggagttcttcccgacggaggcccagctttcgaggaagataggccagagcctctgggacgtctcgcgctcgagcaccggaaatttggtggagtggttcctcctgcggaaggcctacaagaggaacgagctcgccccaaacaagcccgacgagagggagctcgcgagacggcgcgggggctacgctggcgggtacgttaaggaaccagagcggggattgtgggacaacattgtgtatttagacttccgctcgctgtatccttcaatcatcataacccacaacgtctcgccggataccctcaaccgcgagggctgtaaagagtacgacgtcgcccctgaggttggacacaagttctgcaaggacttccccggcttcataccaagcctcctgggagatttgctcgaggagaggcagaagataaagcggaagatgaaggcaacggttgacccgctggagaagaaactcctcgattacaggcagaggcttataaaaatcctcgccaacagcttctacggctactacggctacgccaaggcccggtggtactgcaaggagtgcgccgagagcgttacggcctggggaagggagtatatagaaatggttatccgggaactcgaagaaaaattcggttttaaagttctctatgccgatacagacggtctccatgctaccattcccggagcagacgctgaaacagtcaagaaaaaagcaaaggagttcttaaaatacattaatccaaaactgcccggcctgctcgaacttgagtacgagggcttctacgtgaggggcttcttcgtcacgaagaagaagtacgctgtgatagacgaggagggcaagataaccacgaggggtcttgagattgtgaggcgcgactggagcgagatagcgaaggagacccaggccagggtcttagaggcgatactcaagcacggtgacgtcgaggaggccgttaggatagtcaaggaagtgacggaaaagctgagcaagtatgaggtcccgcccgagaagctggtaatccacgagcagataacgcgcgatttgagggattacaaagccaccggcccgcacgttgccgttgcgaagaggctcgcggcgcgtggagtgaaaatccggcccggcacggtgataagctacatcgtcctaaagggctctggaaggataggcgacagggcgattccagctgatgagttcgacccgacgaagcaccgctacgatgcggaatactacatcgagaaccaggttctcccggcggtggagaggattctaaaagccttcggctatcggaaggaggatttgcgctaccagaagacgaagcaggtcggctcgggcgcgtggctgaaggtgaaggggaagaagggtaccgaagcttacgtagaacaaaaactcatctcagaagaggatctgaatagcgccgtcgaccatcatcatcatcatcattga

SEQ ID NO: 34 - protein, 802 aa, Artificial Sequence
  Description of Artificial Sequence:Thermococcus species 9degreesN-7 mutant DNA polymerase, 9degreesN mutant
MILDTDYITENGKPVIRVFKKENGEFKIEYDRTFEPYFYALLKDDSAIEDVKKVTAKRHGTVVKVKRAEKVQKKFLGRPIEVWKLYFNHPQDVPAIRDRIRAHPAVVDIYEYDIPFAKRYLIDKGLIPMEGDEELTMLAFAIATLYHEGEEFGTGPILMISYADGSEARVITWKKIDLPYVDVVSTEKEMIKRFLRVVREKDPDVLITYNGDNFDFAYLKKRCEELGIKFTLGRDGSEPKIQRMGDRFAVEVKGRIHFDLYPVIRRTINLPTYTLEAVYEAVFGKPKEKVYAEEIAQAWESGEGLERVARYSMEDAKVTYELGREFFPTEAQLSRKIGQSLWDVSRSSTGNLVEWFLLRKAYKRNELAPNKPDERELARRRGGYAGGYVKEPERGLWDNIVYLDFRSLYPSIIITHNVSPDTLNREGCKEYDVAPEVGHKFCKDFPGFIPSLLGDLLEERQKIKRKMKATVDPLEKKLLDYRQRLIKILANSFYGYYGYAKARWYCKECAESVTAWGREYIEMVIRELEEKFGFKVLYADTDGLHATIPGADAETVKKKAKEFLKYINPKLPGLLELEYEGFYVRGFFVTKKKYAVIDEEGKITTRGLEIVRRDWSEIAKETQARVLEAILKHGDVEEAVRIVKEVTEKLSKYEVPPEKLVIHEQITRDLRDYKATGPHVAVAKRLAARGVKIRPGTVISYIVLKGSGRIGDRAIPADEFDPTKHRYDAEYYIENQVLPAVERILKAFGYRKEDLRYQKTKQVGSGAWLKVKGKKGTEAYVEQKLISEEDLNSAVDHHHHHH

SEQ ID NO: 35 - DNA, 2409 bp, Artificial Sequence
  Description of Artificial Sequence:Thermococcus species 9degreesN-7 mutant DNA polymerase, 9degreesN mutant
atgattctcgataccgactacatcaccgagaacgggaagcccgtgataagggtcttcaagaaggagaacggcgagtttaaaatcgagtacgacagaaccttcgagccctacttctacgcccttctgaaggacgattctgcgatagaggacgtcaagaaggtaaccgcaaagaggcacggaacggttgtcaaggtgaagcgcgccgagaaggtgcagaagaagttcctcggcaggccgatagaggtctggaagctctacttcaaccatcctcaggacgtcccggcgattcgagacaggatacgcgcccaccccgctgtcgttgacatctacgagtacgacatacccttcgccaagcgctacctcatcgacaagggcctgattccgatggagggcgacgaggagcttacgatgctcgccttcgcgatcgcaaccctctatcacgagggcgaggagttcggaaccgggccgattctcatgataagctacgccgacgggagcgaggcgagggtgataacctggaagaagattgaccttccgtacgttgacgtcgtctcgaccgagaaggagatgattaagcgcttcctccgcgtcgtcagggagaaggaccccgacgtgctcatcacctacaacggcgacaacttcgacttcgcctacctgaagaagcgctgtgaggaactcggaataaagttcacactcggcagggacgggagcgagccgaagatacagcgaatgggcgaccgctttgccgttgaggtgaagggcaggattcacttcgacctctaccccgtcataaggcgcacgataaacctcccgacctacacccttgaggccgtttacgaggccgtctttggaaagcccaaggagaaggtttacgcagaggagatagcgcaggcctgggagagcggggagggccttgaaagggttgcaagatactcgatggaggacgctaaggtgacctacgagctgggaagggagttcttcccgatggaggcccagctttcgaggcttataggccagagcctctgggacgtctcgcgctcgagcaccggaaatttggtggagtggttcctcctgcggaaggcctacaagaggaacgagctcgccccaaacaagcccgacgagagggagctcgcgagacggcgcgggggctacgctggcgggtacgttaaggaaccagagcggggattgtgggacaacattgtgtatttagacttccgctcgctgtatccttcaatcatcataacccacaacgtctcgccggataccctcaaccgcgagggctgtaaagagtacgacgtcgcccctgaggttggacacaagttctgcaaggacttccccggcttcataccaagcctcctgggagatttgctcgaggagaggcagaagataaagcggaagatgaaggcaacggttgacccgctggagaagaaactcctcgattacaggcagaggggaatcaaaatcctcgccaacagcttctacggctactacggctacgccaaggcccggtggtactgcaaggagtgcgccgagagcgttacggcctggggaagggagtatatagaaatggttatccgggaactcgaagaaaaattcggttttaaagttctctatgccgatacagacggtctccatgctaccattcccggagcagacgctgaaacagtcaagaaaaaagcaaaggagttcttaaaatacattaatccaaaactgcccggcctgctcgaacttgagtacgagggcttctacgtgaggggcttcttcgtcacgaagaagaagtacgctgtgatagacgaggagggcaagataaccacgaggggtcttgagattgtgaggcgcgactggagcgagatagcgaaggagacccaggccagggtcttagaggcgatactcaagcacggtgacgtcgaggaggccgttaggatagtcaaggaagtgacggaaaagctgagcaagtatgaggtcccgcccgagaagctggtaatccacgagcagataacgcgcgatttgagggattacaaagccaccggcccgcacgttgccgttgcgaagaggctcgcggcgcgtggagtgaaaatccggcccggcacggtgataagctacatcgtcctaaagggctctggaaggataggcgacagggcgattccagctgatgagttcgacccgacgaagcaccgctacgatgcggaatactacatcgagaaccaggttctcccggcggtggagaggattctaaaagccttcggctatcggaaggaggatttgcgctaccagaagacgaagcaggtcggctcgggcgcgtggctgaaggtgaaggggaagaagggtaccgaagcttacgtagaacaaaaactcatctcagaagaggatctgaatagcgccgtcgaccatcatcatcatcatcattga

SEQ ID NO: 36 - protein, 802 aa, Artificial Sequence
  Description of Artificial Sequence:Thermococcus species 9degreesN-7 mutant DNA polymerase, 9degreesN mutant
MILDTDYITENGKPVIRVFKKENGEFKIEYDRTFEPYFYALLKDDSAIEDVKKVTAKRHGTVVKVKRAEKVQKKFLGRPIEVWKLYFNHPQDVPAIRDRIRAHPAVVDIYEYDIPFAKRYLIDKGLIPMEGDEELTMLAFAIATLYHEGEEFGTGPILMISYADGSEARVITWKKIDLPYVDVVSTEKEMIKRFLRVVREKDPDVLITYNGDNFDFAYLKKRCEELGIKFTLGRDGSEPKIQRMGDRFAVEVKGRIHFDLYPVIRRTINLPTYTLEAVYEAVFGKPKEKVYAEEIAQAWESGEGLERVARYSMEDAKVTYELGREFFPMEAQLSRLIGQSLWDVSRSSTGNLVEWFLLRKAYKRNELAPNKPDERELARRRGGYAGGYVKEPERGLWDNIVYLDFRSLYPSIIITHNVSPDTLNREGCKEYDVAPEVGHKFCKDFPGFIPSLLGDLLEERQKIKRKMKATVDPLEKKLLDYRQRGIKILANSFYGYYGYAKARWYCKECAESVTAWGREYIEMVIRELEEKFGFKVLYADTDGLHATIPGADAETVKKKAKEFLKYINPKLPGLLELEYEGFYVRGFFVTKKKYAVIDEEGKITTRGLEIVRRDWSEIAKETQARVLEAILKHGDVEEAVRIVKEVTEKLSKYEVPPEKLVIHEQITRDLRDYKATGPHVAVAKRLAARGVKIRPGTVISYIVLKGSGRIGDRAIPADEFDPTKHRYDAEYYIENQVLPAVERILKAFGYRKEDLRYQKTKQVGSGAWLKVKGKKGTEAYVEQKLISEEDLNSAVDHHHHHH

SEQ ID NO: 37 - DNA, 2409 bp, Artificial Sequence
  Description of Artificial Sequence:Thermococcus species 9degreesN-7 mutant DNA polymerase, 9degreesN mutant
atgattctcgataccgactacatcaccgagaacgggaagcccgtgataagggtcttcaagaaggagaacggcgagtttaaaatcgagtacgacagaaccttcgagccctacttctacgcccttctgaaggacgattctgcgatagaggacgtcaagaaggtaaccgcaaagaggcacggaacggttgtcaaggtgaagcgcgccgagaaggtgcagaagaagttcctcggcaggccgatagaggtctggaagctctacttcaaccatcctcaggacgtcccggcgattcgagacaggatacgcgcccaccccgctgtcgttgacatctacgagtacgacatacccttcgccaagcgctacctcatcgacaagggcctgattccgatggagggcgacgaggagcttacgatgctcgccttcgcgatcgcaaccctctatcacgagggcgaggagttcggaaccgggccgattctcatgataagctacgccgacgggagcgaggcgagggtgataacctggaagaagattgaccttccgtacgttgacgtcgtctcgaccgagaaggagatgattaagcgcttcctccgcgtcgtcagggagaaggaccccgacgtgctcatcacctacaacggcgacaacttcgacttcgcctacctgaagaagcgctgtgaggaactcggaataaagttcacactcggcagggacgggagcgagccgaagatacagcgaatgggcgaccgctttgccgttgaggtgaagggcaggattcacttcgacctctaccccgtcataaggcgcacgataaacctcccgacctacacccttgaggccgtttacgaggccgtctttggaaagcccaaggagaaggtttacgcagaggagatagcgcaggcctgggagagcggggagggccttgaaagggttgcaagatactcgatggaggacgctaaggtgacctacgagctgggaagggagttcttcccgatggaggcccagctttcgaggaaaataggccagagcctctgggacgtctcgcgctcgagcaccggaaatttggtggagtggttcctcctgcggaaggcctacaagaggaacgagctcgccccaaacaagcccgacgagagggagctcgcgagacggcgcgggggctacgctggcgggtacgttaaggaaccagagcggggattgtgggacaacattgtgtatttagacttccgctcgctgtatccttcaatcatcataacccacaacgtctcgccggataccctcaaccgcgagggctgtaaagagtacgacgtcgcccctgaggttggacacaagttctgcaaggacttccccggcttcataccaagcctcctgggagatttgctcgaggagaggcagaagataaagcggaagatgaaggcaacggttgacccgctggagaagaaactcctcgattacaggcagaggcaaatcaaaatcctcgccaacagcttctacggctactacggctacgccaaggcccggtggtactgcaaggagtgcgccgagagcgttacggcctggggaagggagtatatagaaatggttatccgggaactcgaagaaaaattcggttttaaagttctctatgccgatacagacggtctccatgctaccattcccggagcagacgctgaaacagtcaagaaaaaagcaaaggagttcttaaaatacattaatccaaaactgcccggcctgctcgaacttgagtacgagggcttctacgtgaggggcttcttcgtcacgaagaagaagtacgctgtgatagacgaggagggcaagataaccacgaggggtcttgagattgtgaggcgcgactggagcgagatagcgaaggagacccaggccagggtcttagaggcgatactcaagcacggtgacgtcgaggaggccgttaggatagtcaaggaagtgacggaaaagctgagcaagtatgaggtcccgcccgagaagctggtaatccacgagcagataacgcgcgatttgagggattacaaagccaccggcccgcacgttgccgttgcgaagaggctcgcggcgcgtggagtgaaaatccggcccggcacggtgataagctacatcgtcctaaagggctctggaaggataggcgacagggcgattccagctgatgagttcgacccgacgaagcaccgctacgatgcggaatactacatcgagaaccaggttctcccggcggtggagaggattctaaaagccttcggctatcggaaggaggatttgcgctaccagaagacgaagcaggtcggctcgggcgcgtggctgaaggtgaaggggaagaagggtaccgaagcttacgtagaacaaaaactcatctcagaagaggatctgaatagcgccgtcgaccatcatcatcatcatcattga

SEQ ID NO: 38 - protein, 802 aa, Artificial Sequence
  Description of Artificial Sequence:Thermococcus species 9degreesN-7 mutant DNA polymerase, 9degreesN mutant
MILDTDYITENGKPVIRVFKKENGEFKIEYDRTFEPYFYALLKDDSAIEDVKKVTAKRHGTVVKVKRAEKVQKKFLGRPIEVWKLYFNHPQDVPAIRDRIRAHPAVVDIYEYDIPFAKRYLIDKGLIPMEGDEELTMLAFAIATLYHEGEEFGTGPILMISYADGSEARVITWKKIDLPYVDVVSTEKEMIKRFLRVVREKDPDVLITYNGDNFDFAYLKKRCEELGIKFTLGRDGSEPKIQRMGDRFAVEVKGRIHFDLYPVIRRTINLPTYTLEAVYEAVFGKPKEKVYAEEIAQAWESGEGLERVARYSMEDAKVTYELGREFFPMEAQLSRKIGQSLWDVSRSSTGNLVEWFLLRKAYKRNELAPNKPDERELARRRGGYAGGYVKEPERGLWDNIVYLDFRSLYPSIIITHNVSPDTLNREGCKEYDVAPEVGHKFCKDFPGFIPSLLGDLLEERQKIKRKMKATVDPLEKKLLDYRQRQIKILANSFYGYYGYAKARWYCKECAESVTAWGREYIEMVIRELEEKFGFKVLYADTDGLHATIPGADAETVKKKAKEFLKYINPKLPGLLELEYEGFYVRGFFVTKKKYAVIDEEGKITTRGLEIVRRDWSEIAKETQARVLEAILKHGDVEEAVRIVKEVTEKLSKYEVPPEKLVIHEQITRDLRDYKATGPHVAVAKRLAARGVKIRPGTVISYIVLKGSGRIGDRAIPADEFDPTKHRYDAEYYIENQVLPAVERILKAFGYRKEDLRYQKTKQVGSGAWLKVKGKKGTEAYVEQKLISEEDLNSAVDHHHHHH

SEQ ID NO: 39 - DNA, 2409 bp, Artificial Sequence
  Description of Artificial Sequence:Thermococcus species 9degreesN-7 mutant DNA polymerase, 9degreesN mutant
atgattctcgataccgactacatcaccgagaacgggaagcccgtgataagggtcttcaagaaggagaacggcgagtttaaaatcgagtacgacagaaccttcgagccctacttctacgcccttctgaaggacgattctgcgatagaggacgtcaagaaggtaaccgcaaagaggcacggaacggttgtcaaggtgaagcgcgccgagaaggtgcagaagaagttcctcggcaggccgatagaggtctggaagctctacttcaaccatcctcaggacgtcccggcgattcgagacaggatacgcgcccaccccgctgtcgttgacatctacgagtacgacatacccttcgccaagcgctacctcatcgacaagggcctgattccgatggagggcgacgaggagcttacgatgctcgccttcgcgatcgcaaccctctatcacgagggcgaggagttcggaaccgggccgattctcatgataagctacgccgacgggagcgaggcgagggtgataacctggaagaagattgaccttccgtacgttgacgtcgtctcgaccgagaaggagatgattaagcgcttcctccgcgtcgtcagggagaaggaccccgacgtgctcatcacctacaacggcgacaacttcgacttcgcctacctgaagaagcgctgtgaggaactcggaataaagttcacactcggcagggacgggagcgagccgaagatacagcgaatgggcgaccgctttgccgttgaggtgaagggcaggattcacttcgacctctaccccgtcataaggcgcacgataaacctcccgacctacacccttgaggccgtttacgaggccgtctttggaaagcccaaggagaaggtttacgcagaggagatagcgcaggcctgggagagcggggagggccttgaaagggttgcaagatactcgatggaggacgctaaggtgacctacgagctgggaagggagttcttcccgatggaggcccagctttcgaggtttataggccagagcctctgggacgtctcgcgctcgagcaccggaaatttggtggagtggttcctcctgcggaaggcctacaagaggaacgagctcgccccaaacaagcccgacgagagggagctcgcgagacggcgcgggggctacgctggcgggtacgttaaggaaccagagcggggattgtgggacaacattgtgtatttagacttccgctcgctgtatccttcaatcatcataacccacaacgtctcgccggataccctcaaccgcgagggctgtaaagagtacgacgtcgcccctgaggttggacacaagttctgcaaggacttccccggcttcataccaagcctcctgggagatttgctcgaggagaggcagaagataaagcggaagatgaaggcaacggttgacccgctggagaagaaactcctcgattacaggcagaggcaaatcaaaatcctcgccaacagcttctacggctactacggctacgccaaggcccggtggtactgcaaggagtgcgccgagagcgttacggcctggggaagggagtatatagaaatggttatccgggaactcgaagaaaaattcggttttaaagttctctatgccgatacagacggtctccatgctaccattcccggagcagacgctgaaacagtcaagaaaaaagcaaaggagttcttaaaatacattaatccaaaactgcccggcctgctcgaacttgagtacgagggcttctacgtgaggggcttcttcgtcacgaagaagaagtacgctgtgatagacgaggagggcaagataaccacgaggggtcttgagattgtgaggcgcgactggagcgagatagcgaaggagacccaggccagggtcttagaggcgatactcaagcacggtgacgtcgaggaggccgttaggatagtcaaggaagtgacggaaaagctgagcaagtatgaggtcccgcccgagaagctggtaatccacgagcagataacgcgcgatttgagggattacaaagccaccggcccgcacgttgccgttgcgaagaggctcgcggcgcgtggagtgaaaatccggcccggcacggtgataagctacatcgtcctaaagggctctggaaggataggcgacagggcgattccagctgatgagttcgacccgacgaagcaccgctacgatgcggaatactacatcgagaaccaggttctcccggcggtggagaggattctaaaagccttcggctatcggaaggaggatttgcgctaccagaagacgaagcaggtcggctcgggcgcgtggctgaaggtgaaggggaagaagggtaccgaagcttacgtagaacaaaaactcatctcagaagaggatctgaatagcgccgtcgaccatcatcatcatcatcattga

SEQ ID NO: 40 - protein, 802 aa, Artificial Sequence
  Description of Artificial Sequence:Thermococcus species 9degreesN-7 mutant DNA polymerase, 9degreesN mutant
MILDTDYITENGKPVIRVFKKENGEFKIEYDRTFEPYFYALLKDDSAIEDVKKVTAKRHGTVVKVKRAEKVQKKFLGRPIEVWKLYFNHPQDVPAIRDRIRAHPAVVDIYEYDIPFAKRYLIDKGLIPMEGDEELTMLAFAIATLYHEGEEFGTGPILMISYADGSEARVITWKKIDLPYVDVVSTEKEMIKRFLRVVREKDPDVLITYNGDNFDFAYLKKRCEELGIKFTLGRDGSEPKIQRMGDRFAVEVKGRIHFDLYPVIRRTINLPTYTLEAVYEAVFGKPKEKVYAEEIAQAWESGEGLERVARYSMEDAKVTYELGREFFPMEAQLSRFIGQSLWDVSRSSTGNLVEWFLLRKAYKRNELAPNKPDERELARRRGGYAGGYVKEPERGLWDNIVYLDFRSLYPSIIITHNVSPDTLNREGCKEYDVAPEVGHKFCKDFPGFIPSLLGDLLEERQKIKRKMKATVDPLEKKLLDYRQRQIKILANSFYGYYGYAKARWYCKECAESVTAWGREYIEMVIRELEEKFGFKVLYADTDGLHATIPGADAETVKKKAKEFLKYINPKLPGLLELEYEGFYVRGFFVTKKKYAVIDEEGKITTRGLEIVRRDWSEIAKETQARVLEAILKHGDVEEAVRIVKEVTEKLSKYEVPPEKLVIHEQITRDLRDYKATGPHVAVAKRLAARGVKIRPGTVISYIVLKGSGRIGDRAIPADEFDPTKHRYDAEYYIENQVLPAVERILKAFGYRKEDLRYQKTKQVGSGAWLKVKGKKGTEAYVEQKLISEEDLNSAVDHHHHHH

SEQ ID NO: 41 - DNA, 2409 bp, Artificial Sequence
  Description of Artificial Sequence:Thermococcus species 9degreesN-7 mutant DNA polymerase, 9degreesN mutant
atgattctcgataccgactacatcaccgagaacgggaagcccgtgataagggtcttcaagaaggagaacggcgagtttaaaatcgagtacgacagaaccttcgagccctacttctacgcccttctgaaggacgattctgcgatagaggacgtcaagaaggtaaccgcaaagaggcacggaacggttgtcaaggtgaagcgcgccgagaaggtgcagaagaagttcctcggcaggccgatagaggtctggaagctctacttcaaccatcctcaggacgtcccggcgattcgagacaggatacgcgcccaccccgctgtcgttgacatctacgagtacgacatacccttcgccaagcgctacctcatcgacaagggcctgattccgatggagggcgacgaggagcttacgatgctcgccttcgcgatcgcaaccctctatcacgagggcgaggagttcggaaccgggccgattctcatgataagctacgccgacgggagcgaggcgagggtgataacctggaagaagattgaccttccgtacgttgacgtcgtctcgaccgagaaggagatgattaagcgcttcctccgcgtcgtcagggagaaggaccccgacgtgctcatcacctacaacggcgacaacttcgacttcgcctacctgaagaagcgctgtgaggaactcggaataaagttcacactcggcagggacgggagcgagccgaagatacagcgaatgggcgaccgctttgccgttgaggtgaagggcaggattcacttcgacctctaccccgtcataaggcgcacgataaacctcccgacctacacccttgaggccgtttacgaggccgtctttggaaagcccaaggagaaggtttacgcagaggagatagcgcaggcctgggagagcggggagggccttgaaagggttgcaagatactcgatggaggacgctaaggtgacctacgagctgggaagggagttcttcccgatggaggcccagctttcgaggaaaataagccagagcctctgggacgtctcgcgctcgagcaccggaaatttggtggagtggttcctcctgcggaaggcctacaagaggaacgagctcgccccaaacaagcccgacgagagggagctcgcgagacggcgcgggggctacgctggcgggtacgttaaggaaccagagcggggattgtgggacaacattgtgtatttagacttccgctcgctgtatccttcaatcatcataacccacaacgtctcgccggataccctcaaccgcgagggctgtaaagagtacgacgtcgcccctgaggttggacacaagttctgcaaggacttccccggcttcataccaagcctcctgggagatttgctcgaggagaggcagaagataaagcggaagatgaaggcaacggttgacccgctggagaagaaactcctcgattacaggcagaggaaaatcaaaatcctcgccaacagcttctacggctactacggctacgccaaggcccggtggtactgcaaggagtgcgccgagagcgttacggcctggggaagggagtatatagaaatggttatccgggaactcgaagaaaaattcggttttaaagttctctatgccgatacagacggtctccatgctaccattcccggagcagacgctgaaacagtcaagaaaaaagcaaaggagttcttaaaatacattaatccaaaactgcccggcctgctcgaacttgagtacgagggcttctacgtgaggggcttcttcgtcacgaagaagaagtacgctgtgatagacgaggagggcaagataaccacgaggggtcttgagattgtgaggcgcgactggagcgagatagcgaaggagacccaggccagggtcttagaggcgatactcaagcacggtgacgtcgaggaggccgttaggatagtcaaggaagtgacggaaaagctgagcaagtatgaggtcccgcccgagaagctggtaatccacgagcagataacgcgcgatttgagggattacaaagccaccggcccgcacgttgccgttgcgaagaggctcgcggcgcgtggagtgaaaatccggcccggcacggtgataagctacatcgtcctaaagggctctggaaggataggcgacagggcgattccagctgatgagttcgacccgacgaagcaccgctacgatgcggaatactacatcgagaaccaggttctcccggcggtggagaggattctaaaagccttcggctatcggaaggaggatttgcgctaccagaagacgaagcaggtcggctcgggcgcgtggctgaaggtgaaggggaagaagggtaccgaagcttacgtagaacaaaaactcatctcagaagaggatctgaatagcgccgtcgaccatcatcatcatcatcattga

SEQ ID NO: 42 - protein, 802 aa, Artificial Sequence
  Description of Artificial Sequence:Thermococcus species 9degreesN-7 mutant DNA polymerase, 9degreesN mutant
MILDTDYITENGKPVIRVFKKENGEFKIEYDRTFEPYFYALLKDDSAIEDVKKVTAKRHGTVVKVKRAEKVQKKFLGRPIEVWKLYFNHPQDVPAIRDRIRAHPAVVDIYEYDIPFAKRYLIDKGLIPMEGDEELTMLAFAIATLYHEGEEFGTGPILMISYADGSEARVITWKKIDLPYVDVVSTEKEMIKRFLRVVREKDPDVLITYNGDNFDFAYLKKRCEELGIKFTLGRDGSEPKIQRMGDRFAVEVKGRIHFDLYPVIRRTINLPTYTLEAVYEAVFGKPKEKVYAEEIAQAWESGEGLERVARYSMEDAKVTYELGREFFPMEAQLSRKISQSLWDVSRSSTGNLVEWFLLRKAYKRNELAPNKPDERELARRRGGYAGGYVKEPERGLWDNIVYLDFRSLYPSIIITHNVSPDTLNREGCKEYDVAPEVGHKFCKDFPGFIPSLLGDLLEERQKIKRKMKATVDPLEKKLLDYRQRKIKILANSFYGYYGYAKARWYCKECAESVTAWGREYIEMVIRELEEKFGFKVLYADTDGLHATIPGADAETVKKKAKEFLKYINPKLPGLLELEYEGFYVRGFFVTKKKYAVIDEEGKITTRGLEIVRRDWSEIAKETQARVLEAILKHGDVEEAVRIVKEVTEKLSKYEVPPEKLVIHEQITRDLRDYKATGPHVAVAKRLAARGVKIRPGTVISYIVLKGSGRIGDRAIPADEFDPTKHRYDAEYYIENQVLPAVERILKAFGYRKEDLRYQKTKQVGSGAWLKVKGKKGTEAYVEQKLISEEDLNSAVDHHHHHH

SEQ ID NO: 43 - DNA, 2409 bp, Artificial Sequence
  Description of Artificial Sequence:Thermococcus species 9degreesN-7 mutant DNA polymerase, 9degreesN mutant
atgattctcgataccgactacatcaccgagaacgggaagcccgtgataagggtcttcaagaaggagaacggcgagtttaaaatcgagtacgacagaaccttcgagccctacttctacgcccttctgaaggacgattctgcgatagaggacgtcaagaaggtaaccgcaaagaggcacggaacggttgtcaaggtgaagcgcgccgagaaggtgcagaagaagttcctcggcaggccgatagaggtctggaagctctacttcaaccatcctcaggacgtcccggcgattcgagacaggatacgcgcccaccccgctgtcgttgacatctacgagtacgacatacccttcgccaagcgctacctcatcgacaagggcctgattccgatggagggcgacgaggagcttacgatgctcgccttcgcgatcgcaaccctctatcacgagggcgaggagttcggaaccgggccgattctcatgataagctacgccgacgggagcgaggcgagggtgataacctggaagaagattgaccttccgtacgttgacgtcgtctcgaccgagaaggagatgattaagcgcttcctccgcgtcgtcagggagaaggaccccgacgtgctcatcacctacaacggcgacaacttcgacttcgcctacctgaagaagcgctgtgaggaactcggaataaagttcacactcggcagggacgggagcgagccgaagatacagcgaatgggcgaccgctttgccgttgaggtgaagggcaggattcacttcgacctctaccccgtcataaggcgcacgataaacctcccgacctacacccttgaggccgtttacgaggccgtctttggaaagcccaaggagaaggtttacgcagaggagatagcgcaggcctgggagagcggggagggccttgaaagggttgcaagatactcgatggaggacgctaaggtgacctacgagctgggaagggagttcttcccgatggaggcccagctttcgaggagcataggccagagcctctgggacgtctcgcgctcgagcaccggaaatttggtggagtggttcctcctgcggaaggcctacaagaggaacgagctcgccccaaacaagcccgacgagagggagctcgcgagacggcgcgggggctacgctggcgggtacgttaaggaaccagagcggggattgtgggacaacattgtgtatttagacttccgctcgctgtatccttcaatcatcataacccacaacgtctcgccggataccctcaaccgcgagggctgtaaagagtacgacgtcgcccctgaggttggacacaagttctgcaaggacttccccggcttcataccaagcctcctgggagatttgctcgaggagaggcagaagataaagcggaagatgaaggcaacggttgacccgctggagaagaaactcctcgattacaggcagagggccatcaaaatcctcgccaacagcttctacggctactacggctacgccaaggcccggtggtactgcaaggagtgcgccgagagcgttacggcctggggaagggagtatatagaaatggttatccgggaactcgaagaaaaattcggttttaaagttctctatgccgatacagacggtctccatgctaccattcccggagcagacgctgaaacagtcaagaaaaaagcaaaggagttcttaaaatacattaatccaaaactgcccggcctgctcgaacttgagtacgagggcttctacgtgaggggcttcttcgtcacgaagaagaagtacgctgtgatagacgaggagggcaagataaccacgaggggtcttgagattgtgaggcgcgactggagcgagatagcgaaggagacccaggccagggtcttagaggcgatactcaagcacggtgacgtcgaggaggccgttaggatagtcaaggaagtgacggaaaagctgagcaagtatgaggtcccgcccgagaagctggtaatccacgagcagataacgcgcgatttgagggattacaaagccaccggcccgcacgttgccgttgcgaagaggctcgcggcgcgtggagtgaaaatccggcccggcacggtgataagctacatcgtcctaaagggctctggaaggataggcgacagggcgattccagctgatgagttcgacccgacgaagcaccgctacgatgcggaatactacatcgagaaccaggttctcccggcggtggagaggattctaaaagccttcggctatcggaaggaggatttgcgctaccagaagacgaagcaggtcggctcgggcgcgtggctgaaggtgaaggggaagaagggtaccgaagcttacgtagaacaaaaactcatctcagaagaggatctgaatagcgccgtcgaccatcatcatcatcatcattga

SEQ ID NO: 44 - protein, 802 aa, Artificial Sequence
  Description of Artificial Sequence:Thermococcus species 9degreesN-7 mutant DNA polymerase, 9degreesN mutant
MILDTDYITENGKPVIRVFKKENGEFKIEYDRTFEPYFYALLKDDSAIEDVKKVTAKRHGTVVKVKRAEKVQKKFLGRPIEVWKLYFNHPQDVPAIRDRIRAHPAVVDIYEYDIPFAKRYLIDKGLIPMEGDEELTMLAFAIATLYHEGEEFGTGPILMISYADGSEARVITWKKIDLPYVDVVSTEKEMIKRFLRVVREKDPDVLITYNGDNFDFAYLKKRCEELGIKFTLGRDGSEPKIQRMGDRFAVEVKGRIHFDLYPVIRRTINLPTYTLEAVYEAVFGKPKEKVYAEEIAQAWESGEGLERVARYSMEDAKVTYELGREFFPMEAQLSRSIGQSLWDVSRSSTGNLVEWFLLRKAYKRNELAPNKPDERELARRRGGYAGGYVKEPERGLWDNIVYLDFRSLYPSIIITHNVSPDTLNREGCKEYDVAPEVGHKFCKDFPGFIPSLLGDLLEERQKIKRKMKATVDPLEKKLLDYRQRAIKILANSFYGYYGYAKARWYCKECAESVTAWGREYIEMVIRELEEKFGFKVLYADTDGLHATIPGADAETVKKKAKEFLKYINPKLPGLLELEYEGFYVRGFFVTKKKYAVIDEEGKITTRGLEIVRRDWSEIAKETQARVLEAILKHGDVEEAVRIVKEVTEKLSKYEVPPEKLVIHEQITRDLRDYKATGPHVAVAKRLAARGVKIRPGTVISYIVLKGSGRIGDRAIPADEFDPTKHRYDAEYYIENQVLPAVERILKAFGYRKEDLRYQKTKQVGSGAWLKVKGKKGTEAYVEQKLISEEDLNSAVDHHHHHH

SEQ ID NO: 45 - DNA, 2409 bp, Artificial Sequence
  Description of Artificial Sequence:Thermococcus species 9degreesN-7 mutant DNA polymerase, 9degreesN mutant
atgattctcgataccgactacatcaccgagaacgggaagcccgtgataagggtcttcaagaaggagaacggcgagtttaaaatcgagtacgacagaaccttcgagccctacttctacgcccttctgaaggacgattctgcgatagaggacgtcaagaaggtaaccgcaaagaggcacggaacggttgtcaaggtgaagcgcgccgagaaggtgcagaagaagttcctcggcaggccgatagaggtctggaagctctacttcaaccatcctcaggacgtcccggcgattcgagacaggatacgcgcccaccccgctgtcgttgacatctacgagtacgacatacccttcgccaagcgctacctcatcgacaagggcctgattccgatggagggcgacgaggagcttacgatgctcgccttcgcgatcgcaaccctctatcacgagggcgaggagttcggaaccgggccgattctcatgataagctacgccgacgggagcgaggcgagggtgataacctggaagaagattgaccttccgtacgttgacgtcgtctcgaccgagaaggagatgattaagcgcttcctccgcgtcgtcagggagaaggaccccgacgtgctcatcacctacaacggcgacaacttcgacttcgcctacctgaagaagcgctgtgaggaactcggaataaagttcacactcggcagggacgggagcgagccgaagatacagcgaatgggcgaccgctttgccgttgaggtgaagggcaggattcacttcgacctctaccccgtcataaggcgcacgataaacctcccgacctacacccttgaggccgtttacgaggccgtctttggaaagcccaaggagaaggtttacgcagaggagatagcgcaggcctgggagagcggggagggccttgaaagggttgcaagatactcgatggaggacgctaaggtgacctacgagctgggaagggagttcttcccgatggaggcccagctttcgaggtggataggccagagcctctgggacgtctcgcgctcgagcaccggaaatttggtggagtggttcctcctgcggaaggcctacaagaggaacgagctcgccccaaacaagcccgacgagagggagctcgcgagacggcgcgggggctacgctggcgggtacgttaaggaaccagagcggggattgtgggacaacattgtgtatttagacttccgctcgctgtatccttcaatcatcataacccacaacgtctcgccggataccctcaaccgcgagggctgtaaagagtacgacgtcgcccctgaggttggacacaagttctgcaaggacttccccggcttcataccaagcctcctgggagatttgctcgaggagaggcagaagataaagcggaagatgaaggcaacggttgacccgctggagaagaaactcctcgattacaggcagaggttcatcaaaatcctcgccaacagcttctacggctactacggctacgccaaggcccggtggtactgcaaggagtgcgccgagagcgttacggcctggggaagggagtatatagaaatggttatccgggaactcgaagaaaaattcggttttaaagttctctatgccgatacagacggtctccatgctaccattcccggagcagacgctgaaacagtcaagaaaaaagcaaaggagttcttaaaatacattaatccaaaactgcccggcctgctcgaacttgagtacgagggcttctacgtgaggggcttcttcgtcacgaagaagaagtacgctgtgatagacgaggagggcaagataaccacgaggggtcttgagattgtgaggcgcgactggagcgagatagcgaaggagacccaggccagggtcttagaggcgatactcaagcacggtgacgtcgaggaggccgttaggatagtcaaggaagtgacggaaaagctgagcaagtatgaggtcccgcccgagaagctggtaatccacgagcagataacgcgcgatttgagggattacaaagccaccggcccgcacgttgccgttgcgaagaggctcgcggcgcgtggagtgaaaatccggcccggcacggtgataagctacatcgtcctaaagggctctggaaggataggcgacagggcgattccagctgatgagttcgacccgacgaagcaccgctacgatgcggaatactacatcgagaaccaggttctcccggcggtggagaggattctaaaagccttcggctatcggaaggaggatttgcgctaccagaagacgaagcaggtcggctcgggcgcgtggctgaaggtgaaggggaagaagggtaccgaagcttacgtagaacaaaaactcatctcagaagaggatctgaatagcgccgtcgaccatcatcatcatcatcattga

SEQ ID NO: 46 - protein, 802 aa, Artificial Sequence
  Description of Artificial Sequence:Thermococcus species 9degreesN-7 mutant DNA polymerase, 9degreesN mutant
MILDTDYITENGKPVIRVFKKENGEFKIEYDRTFEPYFYALLKDDSAIEDVKKVTAKRHGTVVKVKRAEKVQKKFLGRPIEVWKLYFNHPQDVPAIRDRIRAHPAVVDIYEYDIPFAKRYLIDKGLIPMEGDEELTMLAFAIATLYHEGEEFGTGPILMISYADGSEARVITWKKIDLPYVDVVSTEKEMIKRFLRVVREKDPDVLITYNGDNFDFAYLKKRCEELGIKFTLGRDGSEPKIQRMGDRFAVEVKGRIHFDLYPVIRRTINLPTYTLEAVYEAVFGKPKEKVYAEEIAQAWESGEGLERVARYSMEDAKVTYELGREFFPMEAQLSRWIGQSLWDVSRSSTGNLVEWFLLRKAYKRNELAPNKPDERELARRRGGYAGGYVKEPERGLWDNIVYLDFRSLYPSIIITHNVSPDTLNREGCKEYDVAPEVGHKFCKDFPGFIPSLLGDLLEERQKIKRKMKATVDPLEKKLLDYRQRFIKILANSFYGYYGYAKARWYCKECAESVTAWGREYIEMVIRELEEKFGFKVLYADTDGLHATIPGADAETVKKKAKEFLKYINPKLPGLLELEYEGFYVRGFFVTKKKYAVIDEEGKITTRGLEIVRRDWSEIAKETQARVLEAILKHGDVEEAVRIVKEVTEKLSKYEVPPEKLVIHEQITRDLRDYKATGPHVAVAKRLAARGVKIRPGTVISYIVLKGSGRIGDRAIPADEFDPTKHRYDAEYYIENQVLPAVERILKAFGYRKEDLRYQKTKQVGSGAWLKVKGKKGTEAYVEQKLISEEDLNSAVDHHHHHH

SEQ ID NO: 47 - DNA, 2409 bp, Artificial Sequence
  Description of Artificial Sequence:Thermococcus species 9degreesN-7 mutant DNA polymerase, 9degreesN mutant
atgattctcgataccgactacatcaccgagaacgggaagcccgtgataagggtcttcaagaaggagaacggcgagtttaaaatcgagtacgacagaaccttcgagccctacttctacgcccttctgaaggacgattctgcgatagaggacgtcaagaaggtaaccgcaaagaggcacggaacggttgtcaaggtgaagcgcgccgagaaggtgcagaagaagttcctcggcaggccgatagaggtctggaagctctacttcaaccatcctcaggacgtcccggcgattcgagacaggatacgcgcccaccccgctgtcgttgacatctacgagtacgacatacccttcgccaagcgctacctcatcgacaagggcctgattccgatggagggcgacgaggagcttacgatgctcgccttcgcgatcgcaaccctctatcacgagggcgaggagttcggaaccgggccgattctcatgataagctacgccgacgggagcgaggcgagggtgataacctggaagaagattgaccttccgtacgttgacgtcgtctcgaccgagaaggagatgattaagcgcttcctccgcgtcgtcagggagaaggaccccgacgtgctcatcacctacaacggcgacaacttcgacttcgcctacctgaagaagcgctgtgaggaactcggaataaagttcacactcggcagggacgggagcgagccgaagatacagcgaatgggcgaccgctttgccgttgaggtgaagggcaggattcacttcgacctctaccccgtcataaggcgcacgataaacctcccgacctacacccttgaggccgtttacgaggccgtctttggaaagcccaaggagaaggtttacgcagaggagatagcgcaggcctgggagagcggggagggccttgaaagggttgcaagatactcgatggaggacgctaaggtgacctacgagctgggaagggagttcttcccgatggaggcccgcctttcgaggcttataggccagagcctctgggacgtctcgcgctcgagcaccggaaatttggtggagtggttcctcctgcggaaggcctacaagaggaacgagctcgccccaaacaagcccgacgagagggagctcgcgagacggcgcgggggctacgctggcgggtacgttaaggaaccagagcggggattgtgggacaacattgtgtatttagacttccgctcgctgtatccttcaatcatcataacccacaacgtctcgccggataccctcaaccgcgagggctgtaaagagtacgacgtcgcccctgaggttggacacaagttctgcaaggacttccccggcttcataccaagcctcctgggagatttgctcgaggagaggcagaagataaagcggaagatgaaggcaacggttgacccgctggagaagaaactcctcgattacaggcagagggccatcaaaatcctcgccaacagcttctacggctactacggctacgccaaggcccggtggtactgcaaggagtgcgccgagagcgttacggcctggggaagggagtatatagaaatggttatccgggaactcgaagaaaaattcggttttaaagttctctatgccgatacagacggtctccatgctaccattcccggagcagacgctgaaacagtcaagaaaaaagcaaaggagttcttaaaatacattaatccaaaactgcccggcctgctcgaacttgagtacgagggcttctacgtgaggggcttcttcgtcacgaagaagaagtacgctgtgatagacgaggagggcaagataaccacgaggggtcttgagattgtgaggcgcgactggagcgagatagcgaaggagacccaggccagggtcttagaggcgatactcaagcacggtgacgtcgaggaggccgttaggatagtcaaggaagtgacggaaaagctgagcaagtatgaggtcccgcccgagaagctggtaatccacgagcagataacgcgcgatttgagggattacaaagccaccggcccgcacgttgccgttgcgaagaggctcgcggcgcgtggagtgaaaatccggcccggcacggtgataagctacatcgtcctaaagggctctggaaggataggcgacagggcgattccagctgatgagttcgacccgacgaagcaccgctacgatgcggaatactacatcgagaaccaggttctcccggcggtggagaggattctaaaagccttcggctatcggaaggaggatttgcgctaccagaagacgaagcaggtcggctcgggcgcgtggctgaaggtgaaggggaagaagggtaccgaagcttacgtagaacaaaaactcatctcagaagaggatctgaatagcgccgtcgaccatcatcatcatcatcattga

SEQ ID NO: 48 - protein, 802 aa, Artificial Sequence
  Description of Artificial Sequence:Thermococcus species 9degreesN-7 mutant DNA polymerase, 9degreesN mutant
MILDTDYITENGKPVIRVFKKENGEFKIEYDRTFEPYFYALLKDDSAIEDVKKVTAKRHGTVVKVKRAEKVQKKFLGRPIEVWKLYFNHPQDVPAIRDRIRAHPAVVDIYEYDIPFAKRYLIDKGLIPMEGDEELTMLAFAIATLYHEGEEFGTGPILMISYADGSEARVITWKKIDLPYVDVVSTEKEMIKRFLRVVREKDPDVLITYNGDNFDFAYLKKRCEELGIKFTLGRDGSEPKIQRMGDRFAVEVKGRIHFDLYPVIRRTINLPTYTLEAVYEAVFGKPKEKVYAEEIAQAWESGEGLERVARYSMEDAKVTYELGREFFPMEARLSRLIGQSLWDVSRSSTGNLVEWFLLRKAYKRNELAPNKPDERELARRRGGYAGGYVKEPERGLWDNIVYLDFRSLYPSIIITHNVSPDTLNREGCKEYDVAPEVGHKFCKDFPGFIPSLLGDLLEERQKIKRKMKATVDPLEKKLLDYRQRAIKILANSFYGYYGYAKARWYCKECAESVTAWGREYIEMVIRELEEKFGFKVLYADTDGLHATIPGADAETVKKKAKEFLKYINPKLPGLLELEYEGFYVRGFFVTKKKYAVIDEEGKITTRGLEIVRRDWSEIAKETQARVLEAILKHGDVEEAVRIVKEVTEKLSKYEVPPEKLVIHEQITRDLRDYKATGPHVAVAKRLAARGVKIRPGTVISYIVLKGSGRIGDRAIPADEFDPTKHRYDAEYYIENQVLPAVERILKAFGYRKEDLRYQKTKQVGSGAWLKVKGKKGTEAYVEQKLISEEDLNSAVDHHHHHH

SEQ ID NO: 49 - DNA, 2409 bp, Artificial Sequence
  Description of Artificial Sequence:Thermococcus species 9degreesN-7 mutant DNA polymerase, 9degreesN mutant
atgattctcgataccgactacatcaccgagaacgggaagcccgtgataagggtcttcaagaaggagaacggcgagtttaaaatcgagtacgacagaaccttcgagccctacttctacgcccttctgaaggacgattctgcgatagaggacgtcaagaaggtaaccgcaaagaggcacggaacggttgtcaaggtgaagcgcgccgagaaggtgcagaagaagttcctcggcaggccgatagaggtctggaagctctacttcaaccatcctcaggacgtcccggcgattcgagacaggatacgcgcccaccccgctgtcgttgacatctacgagtacgacatacccttcgccaagcgctacctcatcgacaagggcctgattccgatggagggcgacgaggagcttacgatgctcgccttcgcgatcgcaaccctctatcacgagggcgaggagttcggaaccgggccgattctcatgataagctacgccgacgggagcgaggcgagggtgataacctggaagaagattgaccttccgtacgttgacgtcgtctcgaccgagaaggagatgattaagcgcttcctccgcgtcgtcagggagaaggaccccgacgtgctcatcacctacaacggcgacaacttcgacttcgcctacctgaagaagcgctgtgaggaactcggaataaagttcacactcggcagggacgggagcgagccgaagatacagcgaatgggcgaccgctttgccgttgaggtgaagggcaggattcacttcgacctctaccccgtcataaggcgcacgataaacctcccgacctacacccttgaggccgtttacgaggccgtctttggaaagcccaaggagaaggtttacgcagaggagatagcgcaggcctgggagagcggggagggccttgaaagggttgcaagatactcgatggaggacgctaaggtgacctacgagctgggaagggagttcttcccgatggaggccgtgctttcgaggcttataggccagagcctctgggacgtctcgcgctcgagcaccggaaatttggtggagtggttcctcctgcggaaggcctacaagaggaacgagctcgccccaaacaagcccgacgagagggagctcgcgagacggcgcgggggctacgctggcgggtacgttaaggaaccagagcggggattgtgggacaacattgtgtatttagacttccgctcgctgtatccttcaatcatcataacccacaacgtctcgccggataccctcaaccgcgagggctgtaaagagtacgacgtcgcccctgaggttggacacaagttctgcaaggacttccccggcttcataccaagcctcctgggagatttgctcgaggagaggcagaagataaagcggaagatgaaggcaacggttgacccgctggagaagaaactcctcgattacaggcagaggcgaatcaaaatcctcgccaacagcttctacggctactacggctacgccaaggcccggtggtactgcaaggagtgcgccgagagcgttacggcctggggaagggagtatatagaaatggttatccgggaactcgaagaaaaattcggttttaaagttctctatgccgatacagacggtctccatgctaccattcccggagcagacgctgaaacagtcaagaaaaaagcaaaggagttcttaaaatacattaatccaaaactgcccggcctgctcgaacttgagtacgagggcttctacgtgaggggcttcttcgtcacgaagaagaagtacgctgtgatagacgaggagggcaagataaccacgaggggtcttgagattgtgaggcgcgactggagcgagatagcgaaggagacccaggccagggtcttagaggcgatactcaagcacggtgacgtcgaggaggccgttaggatagtcaaggaagtgacggaaaagctgagcaagtatgaggtcccgcccgagaagctggtaatccacgagcagataacgcgcgatttgagggattacaaagccaccggcccgcacgttgccgttgcgaagaggctcgcggcgcgtggagtgaaaatccggcccggcacggtgataagctacatcgtcctaaagggctctggaaggataggcgacagggcgattccagctgatgagttcgacccgacgaagcaccgctacgatgcggaatactacatcgagaaccaggttctcccggcggtggagaggattctaaaagccttcggctatcggaaggaggatttgcgctaccagaagacgaagcaggtcggctcgggcgcgtggctgaaggtgaaggggaagaagggtaccgaagcttacgtagaacaaaaactcatctcagaagaggatctgaatagcgccgtcgaccatcatcatcatcatcattga

SEQ ID NO: 50 - protein, 802 aa, Artificial Sequence
  Description of Artificial Sequence:Thermococcus species 9degreesN-7 mutant DNA polymerase, 9degreesN mutant
MILDTDYITENGKPVIRVFKKENGEFKIEYDRTFEPYFYALLKDDSAIEDVKKVTAKRHGTVVKVKRAEKVQKKFLGRPIEVWKLYFNHPQDVPAIRDRIRAHPAVVDIYEYDIPFAKRYLIDKGLIPMEGDEELTMLAFAIATLYHEGEEFGTGPILMISYADGSEARVITWKKIDLPYVDVVSTEKEMIKRFLRVVREKDPDVLITYNGDNFDFAYLKKRCEELGIKFTLGRDGSEPKIQRMGDRFAVEVKGRIHFDLYPVIRRTINLPTYTLEAVYEAVFGKPKEKVYAEEIAQAWESGEGLERVARYSMEDAKVTYELGREFFPMEAVLSRLIGQSLWDVSRSSTGNLVEWFLLRKAYKRNELAPNKPDERELARRRGGYAGGYVKEPERGLWDNIVYLDFRSLYPSIIITHNVSPDTLNREGCKEYDVAPEVGHKFCKDFPGFIPSLLGDLLEERQKIKRKMKATVDPLEKKLLDYRQRRIKILANSFYGYYGYAKARWYCKECAESVTAWGREYIEMVIRELEEKFGFKVLYADTDGLHATIPGADAETVKKKAKEFLKYINPKLPGLLELEYEGFYVRGFFVTKKKYAVIDEEGKITTRGLEIVRRDWSEIAKETQARVLEAILKHGDVEEAVRIVKEVTEKLSKYEVPPEKLVIHEQITRDLRDYKATGPHVAVAKRLAARGVKIRPGTVISYIVLKGSGRIGDRAIPADEFDPTKHRYDAEYYIENQVLPAVERILKAFGYRKEDLRYQKTKQVGSGAWLKVKGKKGTEAYVEQKLISEEDLNSAVDHHHHHH

SEQ ID NO: 51 - DNA, 2409 bp, Artificial Sequence
  Description of Artificial Sequence:Thermococcus species 9degreesN-7 mutant DNA polymerase, 9degreesN mutant
atgattctcgataccgactacatcaccgagaacgggaagcccgtgataagggtcttcaagaaggagaacggcgagtttaaaatcgagtacgacagaaccttcgagccctacttctacgcccttctgaaggacgattctgcgatagaggacgtcaagaaggtaaccgcaaagaggcacggaacggttgtcaaggtgaagcgcgccgagaaggtgcagaagaagttcctcggcaggccgatagaggtctggaagctctacttcaaccatcctcaggacgtcccggcgattcgagacaggatacgcgcccaccccgctgtcgttgacatctacgagtacgacatacccttcgccaagcgctacctcatcgacaagggcctgattccgatggagggcgacgaggagcttacgatgctcgccttcgcgatcgcaaccctctatcacgagggcgaggagttcggaaccgggccgattctcatgataagctacgccgacgggagcgaggcgagggtgataacctggaagaagattgaccttccgtacgttgacgtcgtctcgaccgagaaggagatgattaagcgcttcctccgcgtcgtcagggagaaggaccccgacgtgctcatcacctacaacggcgacaacttcgacttcgcctacctgaagaagcgctgtgaggaactcggaataaagttcacactcggcagggacgggagcgagccgaagatacagcgaatgggcgaccgctttgccgttgaggtgaagggcaggattcacttcgacctctaccccgtcataaggcgcacgataaacctcccgacctacacccttgaggccgtttacgaggccgtctttggaaagcccaaggagaaggtttacgcagaggagatagcgcaggcctgggagagcggggagggccttgaaagggttgcaagatactcgatggaggacgctaaggtgacctacgagctgggaagggagttcttcccgatggaggccgagctttcgaggcttataggccagagcctctgggatgtctcgcgctcgagcaccggaaatttggtggagtggttcctcctgcggaaggcctacaagaggaacgagctcgccccaaacaagcccgacgagagggagctcgcgagacggcgcgggggctacgctggcgggtacgttaaggaaccagagcggggattgtgggacaacattgtgtatttagacttccgctcgctgtatccttcaatcatcataacccacaacgtctcgccggataccctcaaccgcgagggctgtaaagagtacgacgtcgcccctgaggttggacacaagttctgcaaggacttccccggcttcataccaagcctcctgggagatttgctcgaggagaggcagaagataaagcggaagatgaaggcaacggttgacccgctggagaagaaactcctcgattacaggcagaggggtatcaaaatcctcgccaacagcttctacggctactacggctacgccaaggcccggtggtactgcaaggagtgcgccgagagcgttacggcctggggaagggagtatatagaaatggttatccgggaactcgaagaaaaattcggttttaaagttctctatgccgatacagacggtctccatgctaccattcccggagcagacgctgaaacagtcaagaaaaaagcaaaggagttcttaaaatacattaatccaaaactgcccggcctgctcgaacttgagtacgagggcttctacgtgaggggcttcttcgtcacgaagaagaagtacgctgtgatagacgaggagggcaagataaccacgaggggtcttgagattgtgaggcgcgactggagcgagatagcgaaggagacccaggccagggtcttagaggcgatactcaagcacggtgacgtcgaggaggccgttaggatagtcaaggaagtgacggaaaagctgagcaagtatgaggtcccgcccgagaagctggtaatccacgagcagataacgcgcgatttgagggattacaaagccaccggcccgcacgttgccgttgcgaagaggctcgcggcgcgtggagtgaaaatccggcccggcacggtgataagctacatcgtcctaaagggctctggaaggataggcgacagggcgattccagctgatgagttcgacccgacgaagcaccgctacgatgcggaatactacatcgagaaccaggttctcccggcggtggagaggattctaaaagccttcggctatcggaaggaggatttgcgctaccagaagacgaagcaggtcggctcgggcgcgtggctgaaggtgaaggggaagaagggtaccgaagcttacgtagaacaaaaactcatctcagaagaggatctgaatagcgccgtcgaccatcatcatcatcatcattga

SEQ ID NO: 52 - protein, 802 aa, Artificial Sequence
  Description of Artificial Sequence:Thermococcus species 9degreesN-7 mutant DNA polymerase, 9degreesN mutant
MILDTDYITENGKPVIRVFKKENGEFKIEYDRTFEPYFYALLKDDSAIEDVKKVTAKRHGTVVKVKRAEKVQKKFLGRPIEVWKLYFNHPQDVPAIRDRIRAHPAVVDIYEYDIPFAKRYLIDKGLIPMEGDEELTMLAFAIATLYHEGEEFGTGPILMISYADGSEARVITWKKIDLPYVDVVSTEKEMIKRFLRVVREKDPDVLITYNGDNFDFAYLKKRCEELGIKFTLGRDGSEPKIQRMGDRFAVEVKGRIHFDLYPVIRRTINLPTYTLEAVYEAVFGKPKEKVYAEEIAQAWESGEGLERVARYSMEDAKVTYELGREFFPMEAELSRLIGQSLWDVSRSSTGNLVEWFLLRKAYKRNELAPNKPDERELARRRGGYAGGYVKEPERGLWDNIVYLDFRSLYPSIIITHNVSPDTLNREGCKEYDVAPEVGHKFCKDFPGFIPSLLGDLLEERQKIKRKMKATVDPLEKKLLDYRQRGIKILANSFYGYYGYAKARWYCKECAESVTAWGREYIEMVIRELEEKFGFKVLYADTDGLHATIPGADAETVKKKAKEFLKYINPKLPGLLELEYEGFYVRGFFVTKKKYAVIDEEGKITTRGLEIVRRDWSEIAKETQARVLEAILKHGDVEEAVRIVKEVTEKLSKYEVPPEKLVIHEQITRDLRDYKATGPHVAVAKRLAARGVKIRPGTVISYIVLKGSGRIGDRAIPADEFDPTKHRYDAEYYIENQVLPAVERILKAFGYRKEDLRYQKTKQVGSGAWLKVKGKKGTEAYVEQKLISEEDLNSAVDHHHHHH

SEQ ID NO: 53 - DNA, 2409 bp, Artificial Sequence
  Description of Artificial Sequence:Thermococcus species 9degreesN-7 mutant DNA polymerase, 9degreesN mutant
atgattctcgataccgactacatcaccgagaacgggaagcccgtgataagggtcttcaagaaggagaacggcgagtttaaaatcgagtacgacagaaccttcgagccctacttctacgcccttctgaaggacgattctgcgatagaggacgtcaagaaggtaaccgcaaagaggcacggaacggttgtcaaggtgaagcgcgccgagaaggtgcagaagaagttcctcggcaggccgatagaggtctggaagctctacttcaaccatcctcaggacgtcccggcgattcgagacaggatacgcgcccaccccgctgtcgttgacatctacgagtacgacatacccttcgccaagcgctacctcatcgacaagggcctgattccgatggagggcgacgaggagcttacgatgctcgccttcgcgatcgcaaccctctatcacgagggcgaggagttcggaaccgggccgattctcatgataagctacgccgacgggagcgaggcgagggtgataacctggaagaagattgaccttccgtacgttgacgtcgtctcgaccgagaaggagatgattaagcgcttcctccgcgtcgtcagggagaaggaccccgacgtgctcatcacctacaacggcgacaacttcgacttcgcctacctgaagaagcgctgtgaggaactcggaataaagttcacactcggcagggacgggagcgagccgaagatacagcgaatgggcgaccgctttgccgttgaggtgaagggcaggattcacttcgacctctaccccgtcataaggcgcacgataaacctcccgacctacacccttgaggccgtttacgaggccgtctttggaaagcccaaggagaaggtttacgcagaggagatagcgcaggcctgggagagcggggagggccttgaaagggttgcaagatactcgatggaggacgctaaggtgacctacgagctgggaagggagttcttcccgatggaggcccacctttcgaggcttataggccagagcctctgggacgtctcgcgctcgagcaccggaaatttggtggagtggttcctcctgcggaaggcctacaagaggaacgagctcgccccaaacaagcccgacgagagggagctcgcgagacggcgcgggggctacgctggcgggtacgttaaggaaccagagcggggattgtgggacaacattgtgtatttagacttccgctcgctgtatccttcaatcatcataacccacaacgtctcgccggataccctcaaccgcgagggctgtaaagagtacgacgtcgcccctgaggttggacacaagttctgcaaggacttccccggcttcataccaagcctcctgggagatttgctcgaggagaggcagaagataaagcggaagatgaaggcaacggttgacccgctggagaagaaactcctcgattacaggcagaggctaatcaaaatcctcgccaacagcttctacggctactacggctacgccaaggcccggtggtactgcaaggagtgcgccgagagcgttacggcctggggaagggagtatatagaaatggttatccgggaactcgaagaaaaattcggttttaaagttctctatgccgatacagacggtctccatgctaccattcccggagcagacgctgaaacagtcaagaaaaaagcaaaggagttcttaaaatacattaatccaaaactgcccggcctgctcgaacttgagtacgagggcttctacgtgaggggcttcttcgtcacgaagaagaagtacgctgtgatagacgaggagggcaagataaccacgaggggtcttgagattgtgaggcgcgactggagcgagatagcgaaggagacccaggccagggtcttagaggcgatactcaagcacggtgacgtcgaggaggccgttaggatagtcaaggaagtgacggaaaagctgagcaagtatgaggtcccgcccgagaagctggtaatccacgagcagataacgcgcgatttgagggattacaaagccaccggcccgcacgttgccgttgcgaagaggctcgcggcgcgtggagtgaaaatccggcccggcacggtgataagctacatcgtcctaaagggctctggaaggataggcgacagggcgattccagctgatgagttcgacccgacgaagcaccgctacgatgcggaatactacatcgagaaccaggttctcccggcggtggagaggattctaaaagccttcggctatcggaaggaggatttgcgctaccagaagacgaagcaggtcggctcgggcgcgtggctgaaggtgaaggggaagaagggtaccgaagcttacgtagaacaaaaactcatctcagaagaggatctgaatagcgccgtcgaccatcatcatcatcatcattga

SEQ ID NO: 54 - protein, 802 aa, Artificial Sequence
  Description of Artificial Sequence:Thermococcus species 9degreesN-7 mutant DNA polymerase, 9degreesN mutant
MILDTDYITENGKPVIRVFKKENGEFKIEYDRTFEPYFYALLKDDSAIEDVKKVTAKRHGTVVKVKRAEKVQKKFLGRPIEVWKLYFNHPQDVPAIRDRIRAHPAVVDIYEYDIPFAKRYLIDKGLIPMEGDEELTMLAFAIATLYHEGEEFGTGPILMISYADGSEARVITWKKIDLPYVDVVSTEKEMIKRFLRVVREKDPDVLITYNGDNFDFAYLKKRCEELGIKFTLGRDGSEPKIQRMGDRFAVEVKGRIHFDLYPVIRRTINLPTYTLEAVYEAVFGKPKEKVYAEEIAQAWESGEGLERVARYSMEDAKVTYELGREFFPMEAHLSRLIGQSLWDVSRSSTGNLVEWFLLRKAYKRNELAPNKPDERELARRRGGYAGGYVKEPERGLWDNIVYLDFRSLYPSIIITHNVSPDTLNREGCKEYDVAPEVGHKFCKDFPGFIPSLLGDLLEERQKIKRKMKATVDPLEKKLLDYRQRLIKILANSFYGYYGYAKARWYCKECAESVTAWGREYIEMVIRELEEKFGFKVLYADTDGLHATIPGADAETVKKKAKEFLKYINPKLPGLLELEYEGFYVRGFFVTKKKYAVIDEEGKITTRGLEIVRRDWSEIAKETQARVLEAILKHGDVEEAVRIVKEVTEKLSKYEVPPEKLVIHEQITRDLRDYKATGPHVAVAKRLAARGVKIRPGTVISYIVLKGSGRIGDRAIPADEFDPTKHRYDAEYYIENQVLPAVERILKAFGYRKEDLRYQKTKQVGSGAWLKVKGKKGTEAYVEQKLISEEDLNSAVDHHHHHH

SEQ ID NO: 55 - DNA, 2475 bp, Artificial Sequence
  Description of Artificial Sequence:Thermococcus species 9degreesN-7 mutant DNA polymerase, 9degreesN mutant
atgattctcgataccgactacatcaccgagaacgggaagcccgtgataagggtcttcaagaaggagaacggcgagtttaaaatcgagtacgacagaaccttcgagccctacttctacgcccttctgaaggacgattctgcgatagaggacgtcaagaaggtaaccgcaaagaggcacggaacggttgtcaaggtgaagcgcgccgagaaggtgcagaagaagttcctcggcaggccgatagaggtctggaagctctacttcaaccatcctcaggacgtcccggcgattcgagacaggatacgcgcccaccccgctgtcgttgacatctacgagtacgacatacccttcgccaagcgctacctcatcgacaagggcctgattccgatggagggcgacgaggagcttacgatgctcgccttcgcgatcgcaaccctctatcacgagggcgaggagttcggaaccgggccgattctcatgataagctacgccgacgggagcgaggcgagggtgataacctggaagaagattgaccttccgtacgttgacgtcgtctcgaccgagaaggagatgattaagcgcttcctccgcgtcgtcagggagaaggaccccgacgtgctcatcacctacaacggcgacaacttcgacttcgcctacctgaagaagcgctgtgaggaactcggaataaagttcacactcggcagggacgggagcgagccgaagatacagcgaatgggcgaccgctttgccgttgaggtgaagggcaggattcacttcgacctctaccccgtcataaggcgcacgataaacctcccgacctacacccttgaggccgtttacgaggccgtctttggaaagcccaaggagaaggtttacgcagaggagatagcgcaggcctgggagagcggggagggccttgaaagggttgcaagatactcgatggaggacgctaaggtgacctacgagctgggaagggagttcttcccgcgcgaggcccagctttcggagttcttcccgacggaggcccagctttcgaggcttataggccagagcctctgggacgtctcgcgctcgagcaccggaaatttggtggagtggttcctcctgcggaaggcctacaagaggaacgagctcgccccaaacaagcccgacgagagggagctcgcgagacggcgcgggggctacgctggcgggtacgttaaggaaccagagcggggattgtgggacaacattgtgtatttagacttccgctcgctgtatccttcaatcatcataacccacaacgtctcgccggataccctcaaccgcgagggctgtaaagagtacgacgtcgcccctgaggttggacacaagttctgcaaggacttccccggcttcataccaagcctcctgggagatttgctcgaggagaggcagaagataaagcggaagatgaaggcaacggttgacccgctggagaagaaactcctcgattacaggcagaggccgatcaaaatcctcgccaacagttacaggcagaggtggatcaaaatcctcgccaacagcttctacggctactacggctacgccaaggcccggtggtactgcaaggagtgcgccgagagcgttacggcctggggaagggagtatatagaaatggttatccgggaactcgaagaaaaattcggttttaaagttctctatgccgatacagacggtctccatgctaccattcccggagcagacgctgaaacagtcaagaaaaaagcaaaggagttcttaaaatacattaatccaaaactgcccggcctgctcgaacttgagtacgagggcttctacgtgaggggcttcttcgtcacgaagaagaagtacgctgtgatagacgaggagggcaagataaccacgaggggtcttgagattgtgaggcgcgactggagcgagatagcgaaggagacccaggccagggtcttagaggcgatactcaagcacggtgacgtcgaggaggccgttaggatagtcaaggaagtgacggaaaagctgagcaagtatgaggtcccgcccgagaagctggtaatccacgagcagataacgcgcgatttgagggattacaaagccaccggcccgcacgttgccgttgcgaagaggctcgcggcgcgtggagtgaaaatccggcccggcacggtgataagctacatcgtcctaaagggctctggaaggataggcgacagggcgattccagctgatgagttcgacccgacgaagcaccgctacgatgcggaatactacatcgagaaccaggttctcccggcggtggagaggattctaaaagccttcggctatcggaaggaggatttgcgctaccagaagacgaagcaggtcggctcgggcgcgtggctgaaggtgaaggggaagaagggtaccgaagcttacgtagaacaaaaactcatctcagaagaggatctgaatagcgccgtcgaccatcatcatcatcatcattga

SEQ ID NO: 56 - protein, 824 aa, Artificial Sequence
  Description of Artificial Sequence:Thermococcus species 9degreesN-7 mutant DNA polymerase, 9degreesN mutant
MILDTDYITENGKPVIRVFKKENGEFKIEYDRTFEPYFYALLKDDSAIEDVKKVTAKRHGTVVKVKRAEKVQKKFLGRPIEVWKLYFNHPQDVPAIRDRIRAHPAVVDIYEYDIPFAKRYLIDKGLIPMEGDEELTMLAFAIATLYHEGEEFGTGPILMISYADGSEARVITWKKIDLPYVDVVSTEKEMIKRFLRVVREKDPDVLITYNGDNFDFAYLKKRCEELGIKFTLGRDGSEPKIQRMGDRFAVEVKGRIHFDLYPVIRRTINLPTYTLEAVYEAVFGKPKEKVYAEEIAQAWESGEGLERVARYSMEDAKVTYELGREFFPREAQLSEFFPTEAQLSRLIGQSLWDVSRSSTGNLVEWFLLRKAYKRNELAPNKPDERELARRRGGYAGGYVKEPERGLWDNIVYLDFRSLYPSIIITHNVSPDTLNREGCKEYDVAPEVGHKFCKDFPGFIPSLLGDLLEERQKIKRKMKATVDPLEKKLLDYRQRPIKILANSYRQRWIKILANSFYGYYGYAKARWYCKECAESVTAWGREYIEMVIRELEEKFGFKVLYADTDGLHATIPGADAETVKKKAKEFLKYINPKLPGLLELEYEGFYVRGFFVTKKKYAVIDEEGKITTRGLEIVRRDWSEIAKETQARVLEAILKHGDVEEAVRIVKEVTEKLSKYEVPPEKLVIHEQITRDLRDYKATGPHVAVAKRLAARGVKIRPGTVISYIVLKGSGRIGDRAIPADEFDPTKHRYDAEYYIENQVLPAVERILKAFGYRKEDLRYQKTKQVGSGAWLKVKGKKGTEAYVEQKLISEEDLNSAVDHHHHHH

SEQ ID NO: 57 - DNA, 2409 bp, Artificial Sequence
  Description of Artificial Sequence:Thermococcus species 9degreesN-7 mutant DNA polymerase, 9degreesN mutant
atgattctcgataccgactacatcaccgagaacgggaagcccgtgataagggtcttcaagaaggagaacggcgagtttaaaatcgagtacgacagaaccttcgagccctacttctacgcccttctgaaggacgattctgcgatagaggacgtcaagaaggtaaccgcaaagaggcacggaacggttgtcaaggtgaagcgcgccgagaaggtgcagaagaagttcctcggcaggccgatagaggtctggaagctctacttcaaccatcctcaggacgtcccggcgattcgagacaggatacgcgcccaccccgctgtcgttgacatctacgagtacgacatacccttcgccaagcgctacctcatcgacaagggcctgattccgatggagggcgacgaggagcttacgatgctcgccttcgcgatcgcaaccctctatcacgagggcgaggagttcggaaccgggccgattctcatgataagctacgccgacgggagcgaggcgagggtgataacctggaagaagattgaccttccgtacgttgacgtcgtctcgaccgagaaggagatgattaagcgcttcctccgcgtcgtcagggagaaggaccccgacgtgctcatcacctacaacggcgacaacttcgacttcgcctacctgaagaagcgctgtgaggaactcggaataaagttcacactcggcagggacgggagcgagccgaagatacagcgaatgggcgaccgctttgccgttgaggtgaagggcaggattcacttcgacctctaccccgtcataaggcgcacgataaacctcccgacctacacccttgaggccgtttacgaggccgtctttggaaagcccaaggagaaggtttacgcagaggagatagcgcaggcctgggagagcggggagggccttgaaagggttgcaagatactcgatggaggacgctaaggtgacctacgagctgggaagggagttcttcccgatggaggccggcctttcgaggcttataggccagagcctctgggacgtctcgcgctcgagcaccggaaatttggtggagtggttcctcctgcggaaggcctacaagaggaacgagctcgccccaaacaagcccgacgagagggagctcgcgagacggcgcgggggctacgctggcgggtacgttaaggaaccagagcggggattgtgggacaacattgtgtatttagacttccgctcgctgtatccttcaatcatcataacccacaacgtctcgccggataccctcaaccgcgagggctgtaaagagtacgacgtcgcccctgaggttggacacaagttctgcaaggacttccccggcttcataccaagcctcctgggagatttgctcgaggagaggcagaagataaagcggaagatgaaggcaacggttgacccgctggagaagaaactcctcgattacaggcagaggcccatcaaaatcctcgccaacagcttctacggctactacggctacgccaaggcccggtggtactgcaaggagtgcgccgagagcgttacggcctggggaagggagtatatagaaatggttatccgggaactcgaagaaaaattcggttttaaagttctctatgccgatacagacggtctccatgctaccattcccggagcagacgctgaaacagtcaagaaaaaagcaaaggagttcttaaaatacattaatccaaaactgcccggcctgctcgaacttgagtacgagggcttctacgtgaggggcttcttcgtcacgaagaagaagtacgctgtgatagacgaggagggcaagataaccacgaggggtcttgagattgtgaggcgcgactggagcgagatagcgaaggagacccaggccagggtcttagaggcgatactcaagcacggtgacgtcgaggaggccgttaggatagtcaaggaagtgacggaaaagctgagcaagtatgaggtcccgcccgagaagctggtaatccacgagcagataacgcgcgatttgagggattacaaagccaccggcccgcacgttgccgttgcgaagaggctcgcggcgcgtggagtgaaaatccggcccggcacggtgataagctacatcgtcctaaagggctctggaaggataggcgacagggcgattccagctgatgagttcgacccgacgaagcaccgctacgatgcggaatactacatcgagaaccaggttctcccggcggtggagaggattctaaaagccttcggctatcggaaggaggatttgcgctaccagaagacgaagcaggtcggctcgggcgcgtggctgaaggtgaaggggaagaagggtaccgaagcttacgtagaacaaaaactcatctcagaagaggatctgaatagcgccgtcgaccatcatcatcatcatcattga

SEQ ID NO: 58 - protein, 802 aa, Artificial Sequence
  Description of Artificial Sequence:Thermococcus species 9degreesN-7 mutant DNA polymerase, 9degreesN mutant
MILDTDYITENGKPVIRVFKKENGEFKIEYDRTFEPYFYALLKDDSAIEDVKKVTAKRHGTVVKVKRAEKVQKKFLGRPIEVWKLYFNHPQDVPAIRDRIRAHPAVVDIYEYDIPFAKRYLIDKGLIPMEGDEELTMLAFAIATLYHEGEEFGTGPILMISYADGSEARVITWKKIDLPYVDVVSTEKEMIKRFLRVVREKDPDVLITYNGDNFDFAYLKKRCEELGIKFTLGRDGSEPKIQRMGDRFAVEVKGRIHFDLYPVIRRTINLPTYTLEAVYEAVFGKPKEKVYAEEIAQAWESGEGLERVARYSMEDAKVTYELGREFFPMEAGLSRLIGQSLWDVSRSSTGNLVEWFLLRKAYKRNELAPNKPDERELARRRGGYAGGYVKEPERGLWDNIVYLDFRSLYPSIIITHNVSPDTLNREGCKEYDVAPEVGHKFCKDFPGFIPSLLGDLLEERQKIKRKMKATVDPLEKKLLDYRQRPIKILANSFYGYYGYAKARWYCKECAESVTAWGREYIEMVIRELEEKFGFKVLYADTDGLHATIPGADAETVKKKAKEFLKYINPKLPGLLELEYEGFYVRGFFVTKKKYAVIDEEGKITTRGLEIVRRDWSEIAKETQARVLEAILKHGDVEEAVRIVKEVTEKLSKYEVPPEKLVIHEQITRDLRDYKATGPHVAVAKRLAARGVKIRPGTVISYIVLKGSGRIGDRAIPADEFDPTKHRYDAEYYIENQVLPAVERILKAFGYRKEDLRYQKTKQVGSGAWLKVKGKKGTEAYVEQKLISEEDLNSAVDHHHHHH

SEQ ID NO: 59 - DNA, 2409 bp, Artificial Sequence
  Description of Artificial Sequence:Thermococcus species 9degreesN-7 mutant DNA polymerase, 9degreesN mutant
atgattctcgataccgactacatcaccgagaacgggaagcccgtgataagggtcttcaagaaggagaacggcgagtttaaaatcgagtacgacagaaccttcgagccctacttctacgcccttctgaaggacgattctgcgatagaggacgtcaagaaggtaaccgcaaagaggcacggaacggttgtcaaggtgaagcgcgccgagaaggtgcagaagaagttcctcggcaggccgatagaggtctggaagctctacttcaaccatcctcaggacgtcccggcgattcgagacaggatacgcgcccaccccgctgtcgttgacatctacgagtacgacatacccttcgccaagcgctacctcatcgacaagggcctgattccgatggagggcgacgaggagcttacgatgctcgccttcgcgatcgcaaccctctatcacgagggcgaggagttcggaaccgggccgattctcatgataagctacgccgacgggagcgaggcgagggtgataacctggaagaagattgaccttccgtacgttgacgtcgtctcgaccgagaaggagatgattaagcgcttcctccgcgtcgtcagggagaaggaccccgacgtgctcatcacctacaacggcgacaacttcgacttcgcctacctgaagaagcgctgtgaggaactcggaataaagttcacactcggcagggacgggagcgagccgaagatacagcgaatgggcgaccgctttgccgttgaggtgaagggcaggattcacttcgacctctaccccgtcataaggcgcacgataaacctcccgacctacacccttgaggccgtttacgaggccgtctttggaaagcccaaggagaaggtttacgcagaggagatagcgcaggcctgggagagcggggagggccttgaaagggttgcaagatactcgatggaggacgctaaggtgacctacgagctgggaagggagttcttcccgatggaggcctggctttcgaggcttataggccagagcctctgggacgtctcgcgctcgagcaccggaaatttggtggagtggttcctcctgcggaaggcctacaagaggaacgagctcgccccaaacaagcccgacgagagggagctcgcgagacggcgcgggggctacgctggcgggtacgttaaggaaccagagcggggattgtgggacaacattgtgtatttagacttccgctcgctgtatccttcaatcatcataacccacaacgtctcgccggataccctcaaccgcgagggctgtaaagagtacgacgtcgcccctgaggttggacacaagttctgcaaggacttccccggcttcataccaagcctcctgggagatttgctcgaggagaggcagaagataaagcggaagatgaaggcaacggttgacccgctggagaagaaactcctcgattacaggcagaggttgatcaaaatcctcgccaacagcttctacggctactacggctacgccaaggcccggtggtactgcaaggagtgcgccgagagcgttacggcctggggaagggagtatatagaaatggttatccgggaactcgaagaaaaattcggttttaaagttctctatgccgatacagacggtctccatgctaccattcccggagcagacgctgaaacagtcaagaaaaaagcaaaggagttcttaaaatacattaatccaaaactgcccggcctgctcgaacttgagtacgagggcttctacgtgaggggcttcttcgtcacgaagaagaagtacgctgtgatagacgaggagggcaagataaccacgaggggtcttgagattgtgaggcgcgactggagcgagatagcgaaggagacccaggccagggtcttagaggcgatactcaagcacggtgacgtcgaggaggccgttaggatagtcaaggaagtgacggaaaagctgagcaagtatgaggtcccgcccgagaagctggtaatccacgagcagataacgcgcgatttgagggattacaaagccaccggcccgcacgttgccgttgcgaagaggctcgcggcgcgtggagtgaaaatccggcccggcacggtgataagctacatcgtcctaaagggctctggaaggataggcgacagggcgattccagctgatgagttcgacccgacgaagcaccgctacgatgcggaatactacatcgagaaccaggttctcccggcggtggagaggattctaaaagccttcggctatcggaaggaggatttgcgctaccagaagacgaagcaggtcggctcgggcgcgtggctgaaggtgaaggggaagaagggtaccgaagcttacgtagaacaaaaactcatctcagaagaggatctgaatagcgccgtcgaccatcatcatcatcatcattga

SEQ ID NO: 60 - protein, 802 aa, Artificial Sequence
  Description of Artificial Sequence:Thermococcus species 9degreesN-7 mutant DNA polymerase, 9degreesN mutant
MILDTDYITENGKPVIRVFKKENGEFKIEYDRTFEPYFYALLKDDSAIEDVKKVTAKRHGTVVKVKRAEKVQKKFLGRPIEVWKLYFNHPQDVPAIRDRIRAHPAVVDIYEYDIPFAKRYLIDKGLIPMEGDEELTMLAFAIATLYHEGEEFGTGPILMISYADGSEARVITWKKIDLPYVDVVSTEKEMIKRFLRVVREKDPDVLITYNGDNFDFAYLKKRCEELGIKFTLGRDGSEPKIQRMGDRFAVEVKGRIHFDLYPVIRRTINLPTYTLEAVYEAVFGKPKEKVYAEEIAQAWESGEGLERVARYSMEDAKVTYELGREFFPMEAWLSRLIGQSLWDVSRSSTGNLVEWFLLRKAYKRNELAPNKPDERELARRRGGYAGGYVKEPERGLWDNIVYLDFRSLYPSIIITHNVSPDTLNREGCKEYDVAPEVGHKFCKDFPGFIPSLLGDLLEERQKIKRKMKATVDPLEKKLLDYRQRLIKILANSFYGYYGYAKARWYCKECAESVTAWGREYIEMVIRELEEKFGFKVLYADTDGLHATIPGADAETVKKKAKEFLKYINPKLPGLLELEYEGFYVRGFFVTKKKYAVIDEEGKITTRGLEIVRRDWSEIAKETQARVLEAILKHGDVEEAVRIVKEVTEKLSKYEVPPEKLVIHEQITRDLRDYKATGPHVAVAKRLAARGVKIRPGTVISYIVLKGSGRIGDRAIPADEFDPTKHRYDAEYYIENQVLPAVERILKAFGYRKEDLRYQKTKQVGSGAWLKVKGKKGTEAYVEQKLISEEDLNSAVDHHHHHH

SEQ ID NO: 61 - DNA, 2409 bp, Artificial Sequence
  Description of Artificial Sequence:Thermococcus species 9degreesN-7 mutant DNA polymerase, 9degreesN mutant
atgattctcgataccgactacatcaccgagaacgggaagcccgtgataagggtcttcaagaaggagaacggcgagtttaaaatcgagtacgacagaaccttcgagccctacttctacgcccttctgaaggacgattctgcgatagaggacgtcaagaaggtaaccgcaaagaggcacggaacggttgtcaaggtgaagcgcgccgagaaggtgcagaagaagttcctcggcaggccgatagaggtctggaagctctacttcaaccatcctcaggacgtcccggcgattcgagacaggatacgcgcccaccccgctgtcgttgacatctacgagtacgacatacccttcgccaagcgctacctcatcgacaagggcctgattccgatggagggcgacgaggagcttacgatgctcgccttcgcgatcgcaaccctctatcacgagggcgaggagttcggaaccgggccgattctcatgataagctacgccgacgggagcgaggcgagggtgataacctggaagaagattgaccttccgtacgttgacgtcgtctcgaccgagaaggagatgattaagcgcttcctccgcgtcgtcagggagaaggaccccgacgtgctcatcacctacaacggcgacaacttcgacttcgcctacctgaagaagcgctgtgaggaactcggaataaagttcacactcggcagggacgggagcgagccgaagatacagcgaatgggcgaccgctttgccgttgaggtgaagggcaggattcacttcgacctctaccccgtcataaggcgcacgataaacctcccgacctacacccttgaggccgtttacgaggccgtctttggaaagcccaaggagaaggtttacgcagaggagatagcgcaggcctgggagagcggggagggccttgaaagggttgcaagatactcgatggaggacgctaaggtgacctacgagctgggaagggagttcttcccgatggaggcccgagtctcgaggcttataggccagagcctctgggacgtctcgcgctcgagcaccggaaatttggtggagtggttcctcctgcggaaggcctacaagaggaacgagctcgccccaaacaagcccgacgagagggagctcgcgagacggcgcgggggctacgctggcgggtacgttaaggaaccagagcggggattgtgggacaacattgtgtatttagacttccgctcgctgtatccttcaatcatcataacccacaacgtctcgccggataccctcaaccgcgagggctgtaaagagtacgacgtcgcccctgaggttggacacaagttctgcaaggacttccccggcttcataccaagcctcctgggagatttgctcgaggagaggcagaagataaagcggaagatgaaggcaacggttgacccgctggagaagaaactcctcgattacaggcagagggaaatcaaaatcctcgccaacagcttctacggctactacggctacgccaaggcccggtggtactgcaaggagtgcgccgagagcgttacggcctggggaagggagtatatagaaatggttatccgggaactcgaagaaaaattcggttttaaagttctctatgccgatacagacggtctccatgctaccattcccggagcagacgctgaaacagtcaagaaaaaagcaaaggagttcttaaaatacattaatccaaaactgcccggcctgctcgaacttgagtacgagggcttctacgtgaggggcttcttcgtcacgaagaagaagtacgctgtgatagacgaggagggcaagataaccacgaggggtcttgagattgtgaggcgcgactggagcgagatagcgaaggagacccaggccagggtcttagaggcgatactcaagcacggtgacgtcgaggaggccgttaggatagtcaaggaagtgacggaaaagctgagcaagtatgaggtcccgcccgagaagctggtaatccacgagcagataacgcgcgatttgagggattacaaagccaccggcccgcacgttgccgttgcgaagaggctcgcggcgcgtggagtgaaaatccggcccggcacggtgataagctacatcgtcctaaagggctctggaaggataggcgacagggcgattccagctgatgagttcgacccgacgaagcaccgctacgatgcggaatactacatcgagaaccaggttctcccggcggtggagaggattctaaaagccttcggctatcggaaggaggatttgcgctaccagaagacgaagcaggtcggctcgggcgcgtggctgaaggtgaaggggaagaagggtaccgaagcttacgtagaacaaaaactcatctcagaagaggatctgaatagcgccgtcgaccatcatcatcatcatcattga

SEQ ID NO: 62 - protein, 802 aa, Artificial Sequence
  Description of Artificial Sequence:Thermococcus species 9degreesN-7 mutant DNA polymerase, 9degreesN mutant
MILDTDYITENGKPVIRVFKKENGEFKIEYDRTFEPYFYALLKDDSAIEDVKKVTAKRHGTVVKVKRAEKVQKKFLGRPIEVWKLYFNHPQDVPAIRDRIRAHPAVVDIYEYDIPFAKRYLIDKGLIPMEGDEELTMLAFAIATLYHEGEEFGTGPILMISYADGSEARVITWKKIDLPYVDVVSTEKEMIKRFLRVVREKDPDVLITYNGDNFDFAYLKKRCEELGIKFTLGRDGSEPKIQRMGDRFAVEVKGRIHFDLYPVIRRTINLPTYTLEAVYEAVFGKPKEKVYAEEIAQAWESGEGLERVARYSMEDAKVTYELGREFFPMEARVSRLIGQSLWDVSRSSTGNLVEWFLLRKAYKRNELAPNKPDERELARRRGGYAGGYVKEPERGLWDNIVYLDFRSLYPSIIITHNVSPDTLNREGCKEYDVAPEVGHKFCKDFPGFIPSLLGDLLEERQKIKRKMKATVDPLEKKLLDYRQREIKILANSFYGYYGYAKARWYCKECAESVTAWGREYIEMVIRELEEKFGFKVLYADTDGLHATIPGADAETVKKKAKEFLKYINPKLPGLLELEYEGFYVRGFFVTKKKYAVIDEEGKITTRGLEIVRRDWSEIAKETQARVLEAILKHGDVEEAVRIVKEVTEKLSKYEVPPEKLVIHEQITRDLRDYKATGPHVAVAKRLAARGVKIRPGTVISYIVLKGSGRIGDRAIPADEFDPTKHRYDAEYYIENQVLPAVERILKAFGYRKEDLRYQKTKQVGSGAWLKVKGKKGTEAYVEQKLISEEDLNSAVDHHHHHH

SEQ ID NO: 63 - DNA, 2409 bp, Artificial Sequence
  Description of Artificial Sequence:Thermococcus species 9degreesN-7 mutant DNA polymerase, 9degreesN mutant
atgattctcgataccgactacatcaccgagaacgggaagcccgtgataagggtcttcaagaaggagaacggcgagtttaaaatcgagtacgacagaaccttcgagccctacttctacgcccttctgaaggacgattctgcgatagaggacgtcaagaaggtaaccgcaaagaggcacggaacggttgtcaaggtgaagcgcgccgagaaggtgcagaagaagttcctcggcaggccgatagaggtctggaagctctacttcaaccatcctcaggacgtcccggcgattcgagacaggatacgcgcccaccccgctgtcgttgacatctacgagtacgacatacccttcgccaagcgctacctcatcgacaagggcctgattccgatggagggcgacgaggagcttacgatgctcgccttcgcgatcgcaaccctctatcacgagggcgaggagttcggaaccgggccgattctcatgataagctacgccgacgggagcgaggcgagggtgataacctggaagaagattgaccttccgtacgttgacgtcgtctcgaccgagaaggagatgattaagcgcttcctccgcgtcgtcagggagaaggaccccgacgtgctcatcacctacaacggcgacaacttcgacttcgcctacctgaagaagcgctgtgaggaactcggaataaagttcacactcggcagggacgggagcgagccgaagatacagcgaatgggcgaccgctttgccgttgaggtgaagggcaggattcacttcgacctctaccccgtcataaggcgcacgataaacctcccgacctacacccttgaggccgtttacgaggccgtctttggaaagcccaaggagaaggtttacgcagaggagatagcgcaggcctgggagagcggggagggccttgaaagggttgcaagatactcgatggaggacgctaaggtgacctacgagctgggaagggagttcttcccgatggaggcccgaccttcgaggcttataggccagagcctctgggacgtctcgcgctcgagcaccggaaatttggtggagtggttcctcctgcggaaggcctacaagaggaacgagctcgccccaaacaagcccgacgagagggagctcgcgagacggcgcgggggctacgctggcgggtacgttaaggaaccagagcggggattgtgggacaacattgtgtatttagacttccgctcgctgtatccttcaatcatcataacccacaacgtctcgccggataccctcaaccgcgagggctgtaaagagtacgacgtcgcccctgaggttggacacaagttctgcaaggacttccccggcttcataccaagcctcctgggagatttgctcgaggagaggcagaagataaagcggaagatgaaggcaacggttgacccgctggagaagaaactcctcgattacaggcagaggcacatcaaaatcctcgccaacagcttctacggctactacggctacgccaaggcccggtggtactgcaaggagtgcgccgagagcgttacggcctggggaagggagtatatagaaatggttatccgggaactcgaagaaaaattcggttttaaagttctctatgccgatacagacggtctccatgctaccattcccggagcagacgctgaaacagtcaagaaaaaagcaaaggagttcttaaaatacattaatccaaaactgcccggcctgctcgaacttgagtacgagggcttctacgtgaggggcttcttcgtcacgaagaagaagtacgctgtgatagacgaggagggcaagataaccacgaggggtcttgagattgtgaggcgcgactggagcgagatagcgaaggagacccaggccagggtcttagaggcgatactcaagcacggtgacgtcgaggaggccgttaggatagtcaaggaagtgacggaaaagctgagcaagtatgaggtcccgcccgagaagctggtaatccacgagcagataacgcgcgatttgagggattacaaagccaccggcccgcacgttgccgttgcgaagaggctcgcggcgcgtggagtgaaaatccggcccggcacggtgataagctacatcgtcctaaagggctctggaaggataggcgacagggcgattccagctgatgagttcgacccgacgaagcaccgctacgatgcggaatactacatcgagaaccaggttctcccggcggtggagaggattctaaaagccttcggctatcggaaggaggatttgcgctaccagaagacgaagcaggtcggctcgggcgcgtggctgaaggtgaaggggaagaagggtaccgaagcttacgtagaacaaaaactcatctcagaagaggatctgaatagcgccgtcgaccatcatcatcatcatcattga

SEQ ID NO: 64 - protein, 802 aa, Artificial Sequence
  Description of Artificial Sequence:Thermococcus species 9degreesN-7 mutant DNA polymerase, 9degreesN mutant
MILDTDYITENGKPVIRVFKKENGEFKIEYDRTFEPYFYALLKDDSAIEDVKKVTAKRHGTVVKVKRAEKVQKKFLGRPIEVWKLYFNHPQDVPAIRDRIRAHPAVVDIYEYDIPFAKRYLIDKGLIPMEGDEELTMLAFAIATLYHEGEEFGTGPILMISYADGSEARVITWKKIDLPYVDVVSTEKEMIKRFLRVVREKDPDVLITYNGDNFDFAYLKKRCEELGIKFTLGRDGSEPKIQRMGDRFAVEVKGRIHFDLYPVIRRTINLPTYTLEAVYEAVFGKPKEKVYAEEIAQAWESGEGLERVARYSMEDAKVTYELGREFFPMEARPSRLIGQSLWDVSRSSTGNLVEWFLLRKAYKRNELAPNKPDERELARRRGGYAGGYVKEPERGLWDNIVYLDFRSLYPSIIITHNVSPDTLNREGCKEYDVAPEVGHKFCKDFPGFIPSLLGDLLEERQKIKRKMKATVDPLEKKLLDYRQRHIKILANSFYGYYGYAKARWYCKECAESVTAWGREYIEMVIRELEEKFGFKVLYADTDGLHATIPGADAETVKKKAKEFLKYINPKLPGLLELEYEGFYVRGFFVTKKKYAVIDEEGKITTRGLEIVRRDWSEIAKETQARVLEAILKHGDVEEAVRIVKEVTEKLSKYEVPPEKLVIHEQITRDLRDYKATGPHVAVAKRLAARGVKIRPGTVISYIVLKGSGRIGDRAIPADEFDPTKHRYDAEYYIENQVLPAVERILKAFGYRKEDLRYQKTKQVGSGAWLKVKGKKGTEAYVEQKLISEEDLNSAVDHHHHHH

SEQ ID NO: 65 - DNA, 2409 bp, Artificial Sequence
  Description of Artificial Sequence:Thermococcus species 9degreesN-7 mutant DNA polymerase, 9degreesN mutant
atgattctcgataccgactacatcaccgagaacgggaagcccgtgataagggtcttcaagaaggagaacggcgagtttaaaatcgagtacgacagaaccttcgagccctacttctacgcccttctgaaggacgattctgcgatagaggacgtcaagaaggtaaccgcaaagaggcacggaacggttgtcaaggtgaagcgcgccgagaaggtgcagaagaagttcctcggcaggccgatagaggtctggaagctctacttcaaccatcctcaggacgtcccggcgattcgagacaggatacgcgcccaccccgctgtcgttgacatctacgagtacgacatacccttcgccaagcgctacctcatcgacaagggcctgattccgatggagggcgacgaggagcttacgatgctcgccttcgcgatcgcaaccctctatcacgagggcgaggagttcggaaccgggccgattctcatgataagctacgccgacgggagcgaggcgagggtgataacctggaagaagattgaccttccgtacgttgacgtcgtctcgaccgagaaggagatgattaagcgcttcctccgcgtcgtcagggagaaggaccccgacgtgctcatcacctacaacggcgacaacttcgacttcgcctacctgaagaagcgctgtgaggaactcggaataaagttcacactcggcagggacgggagcgagccgaagatacagcgaatgggcgaccgctttgccgttgaggtgaagggcaggattcacttcgacctctaccccgtcataaggcgcacgataaacctcccgacctacacccttgaggccgtttacgaggccgtctttggaaagcccaaggagaaggtttacgcagaggagatagcgcaggcctgggagagcggggagggccttgaaagggttgcaagatactcgatggaggacgctaaggtgacctacgagctgggaagggagttcttcccgatggaggccagggtttcgaggcttataggccagagcctctgggacgtctcgcgctcgagcaccggaaatttggtggagtggttcctcctgcggaaggcctacaagaggaacgagctcgccccaaacaagcccgacgagagggagctcgcgagacggcgcgggggctacgctggcgggtacgttaaggaaccagagcggggattgtgggacaacattgtgtatttagacttccgctcgctgtatccttcaatcatcataacccacaacgtctcgccggataccctcaaccgcgagggctgtaaagagtacgacgtcgcccctgaggttggacacaagttctgcaaggacttccccggcttcataccaagcctcctgggagatttgctcgaggagaggcagaagataaagcggaagatgaaggcaacggttgacccgctggagaagaaactcctcgattacaggcagaggcttatcaaaatcctcgccaacagcttctacggctactacggctacgccaaggcccggtggtactgcaaggagtgcgccgagagcgttacggcctggggaagggagtatatagaaatggttatccgggaactcgaagaaaaattcggttttaaagttctctatgccgatacagacggtctccatgctaccattcccggagcagacgctgaaacagtcaagaaaaaagcaaaggagttcttaaaatacattaatccaaaactgcccggcctgctcgaacttgagtacgagggcttctacgtgaggggcttcttcgtcacgaagaagaagtacgctgtgatagacgaggagggcaagataaccacgaggggtcttgagattgtgaggcgcgactggagcgagatagcgaaggagacccaggccagggtcttagaggcgatactcaagcacggtgacgtcgaggaggccgttaggatagtcaaggaagtgacggaaaagctgagcaagtatgaggtcccgcccgagaagctggtaatccacgagcagataacgcgcgatttgagggattacaaagccaccggcccgcacgttgccgttgcgaagaggctcgcggcgcgtggagtgaaaatccggcccggcacggtgataagctacatcgtcctaaagggctctggaaggataggcgacagggcgattccagctgatgagttcgacccgacgaagcaccgctacgatgcggaatactacatcgagaaccaggttctcccggcggtggagaggattctaaaagccttcggctatcggaaggaggatttgcgctaccagaagacgaagcaggtcggctcgggcgcgtggctgaaggtgaaggggaagaagggtaccgaagcttacgtagaacaaaaactcatctcagaagaggatctgaatagcgccgtcgaccatcatcatcatcatcattga

SEQ ID NO: 66 - protein, 802 aa, Artificial Sequence
  Description of Artificial Sequence:Thermococcus species 9degreesN-7 mutant DNA polymerase, 9degreesN mutant
MILDTDYITENGKPVIRVFKKENGEFKIEYDRTFEPYFYALLKDDSAIEDVKKVTAKRHGTVVKVKRAEKVQKKFLGRPIEVWKLYFNHPQDVPAIRDRIRAHPAVVDIYEYDIPFAKRYLIDKGLIPMEGDEELTMLAFAIATLYHEGEEFGTGPILMISYADGSEARVITWKKIDLPYVDVVSTEKEMIKRFLRVVREKDPDVLITYNGDNFDFAYLKKRCEELGIKFTLGRDGSEPKIQRMGDRFAVEVKGRIHFDLYPVIRRTINLPTYTLEAVYEAVFGKPKEKVYAEEIAQAWESGEGLERVARYSMEDAKVTYELGREFFPMEARVSRLIGQSLWDVSRSSTGNLVEWFLLRKAYKRNELAPNKPDERELARRRGGYAGGYVKEPERGLWDNIVYLDFRSLYPSIIITHNVSPDTLNREGCKEYDVAPEVGHKFCKDFPGFIPSLLGDLLEERQKIKRKMKATVDPLEKKLLDYRQRLIKILANSFYGYYGYAKARWYCKECAESVTAWGREYIEMVIRELEEKFGFKVLYADTDGLHATIPGADAETVKKKAKEFLKYINPKLPGLLELEYEGFYVRGFFVTKKKYAVIDEEGKITTRGLEIVRRDWSEIAKETQARVLEAILKHGDVEEAVRIVKEVTEKLSKYEVPPEKLVIHEQITRDLRDYKATGPHVAVAKRLAARGVKIRPGTVISYIVLKGSGRIGDRAIPADEFDPTKHRYDAEYYIENQVLPAVERILKAFGYRKEDLRYQKTKQVGSGAWLKVKGKKGTEAYVEQKLISEEDLNSAVDHHHHHH

SEQ ID NO: 67 - DNA, 2409 bp, Artificial Sequence
  Description of Artificial Sequence:Thermococcus species 9degreesN-7 mutant DNA polymerase, 9degreesN mutant
atgattctcgataccgactacatcaccgagaacgggaagcccgtgataagggtcttcaagaaggagaacggcgagtttaaaatcgagtacgacagaaccttcgagccctacttctacgcccttctgaaggacgattctgcgatagaggacgtcaagaaggtaaccgcaaagaggcacggaacggttgtcaaggtgaagcgcgccgagaaggtgcagaagaagttcctcggcaggccgatagaggtctggaagctctacttcaaccatcctcaggacgtcccggcgattcgagacaggatacgcgcccaccccgctgtcgttgacatctacgagtacgacatacccttcgccaagcgctacctcatcgacaagggcctgattccgatggagggcgacgaggagcttacgatgctcgccttcgcgatcgcaaccctctatcacgagggcgaggagttcggaaccgggccgattctcatgataagctacgccgacgggagcgaggcgagggtgataacctggaagaagattgaccttccgtacgttgacgtcgtctcgaccgagaaggagatgattaagcgcttcctccgcgtcgtcagggagaaggaccccgacgtgctcatcacctacaacggcgacaacttcgacttcgcctacctgaagaagcgctgtgaggaactcggaataaagttcacactcggcagggacgggagcgagccgaagatacagcgaatgggcgaccgctttgccgttgaggtgaagggcaggattcacttcgacctctaccccgtcataaggcgcacgataaacctcccgacctacacccttgaggccgtttacgaggccgtctttggaaagcccaaggagaaggtttacgcagaggagatagcgcaggcctgggagagcggggagggccttgaaagggttgcaagatactcgatggaggacgctaaggtgacctacgagctgggaagggagttcttcccgatggaggccagggactcgaggcttataggccagagcctctgggacgtctcgcgctcgagcaccggaaatttggtggagtggttcctcctgcggaaggcctacaagaggaacgagctcgccccaaacaagcccgacgagagggagctcgcgagacggcgcgggggctacgctggcgggtacgttaaggaaccagagcggggattgtgggacaacattgtgtatttagacttccgctcgctgtatccttcaatcatcataacccacaacgtctcgccggataccctcaaccgcgagggctgtaaagagtacgacgtcgcccctgaggttggacacaagttctgcaaggacttccccggcttcataccaagcctcctgggagatttgctcgaggagaggcagaagataaagcggaagatgaaggcaacggttgacccgctggagaagaaactcctcgattacaggcagaggttcatcaaaatcctcgccaacagcttctacggctactacggctacgccaaggcccggtggtactgcaaggagtgcgccgagagcgttacggcctggggaagggagtatatagaaatggttatccgggaactcgaagaaaaattcggttttaaagttctctatgccgatacagacggtctccatgctaccattcccggagcagacgctgaaacagtcaagaaaaaagcaaaggagttcttaaaatacattaatccaaaactgcccggcctgctcgaacttgagtacgagggcttctacgtgaggggcttcttcgtcacgaagaagaagtacgctgtgatagacgaggagggcaagataaccacgaggggtcttgagattgtgaggcgcgactggagcgagatagcgaaggagacccaggccagggtcttagaggcgatactcaagcacggtgacgtcgaggaggccgttaggatagtcaaggaagtgacggaaaagctgagcaagtatgaggtcccgcccgagaagctggtaatccacgagcagataacgcgcgatttgagggattacaaagccaccggcccgcacgttgccgttgcgaagaggctcgcggcgcgtggagtgaaaatccggcccggcacggtgataagctacatcgtcctaaagggctctggaaggataggcgacagggcgattccagctgatgagttcgacccgacgaagcaccgctacgatgcggaatactacatcgagaaccaggttctcccggcggtggagaggattctaaaagccttcggctatcggaaggaggatttgcgctaccagaagacgaagcaggtcggctcgggcgcgtggctgaaggtgaaggggaagaagggtaccgaagcttacgtagaacaaaaactcatctcagaagaggatctgaatagcgccgtcgaccatcatcatcatcatcattga

SEQ ID NO: 68 - protein, 802 aa, Artificial Sequence
  Description of Artificial Sequence:Thermococcus species 9degreesN-7 mutant DNA polymerase, 9degreesN mutant
MILDTDYITENGKPVIRVFKKENGEFKIEYDRTFEPYFYALLKDDSAIEDVKKVTAKRHGTVVKVKRAEKVQKKFLGRPIEVWKLYFNHPQDVPAIRDRIRAHPAVVDIYEYDIPFAKRYLIDKGLIPMEGDEELTMLAFAIATLYHEGEEFGTGPILMISYADGSEARVITWKKIDLPYVDVVSTEKEMIKRFLRVVREKDPDVLITYNGDNFDFAYLKKRCEELGIKFTLGRDGSEPKIQRMGDRFAVEVKGRIHFDLYPVIRRTINLPTYTLEAVYEAVFGKPKEKVYAEEIAQAWESGEGLERVARYSMEDAKVTYELGREFFPMEARDSRLIGQSLWDVSRSSTGNLVEWFLLRKAYKRNELAPNKPDERELARRRGGYAGGYVKEPERGLWDNIVYLDFRSLYPSIIITHNVSPDTLNREGCKEYDVAPEVGHKFCKDFPGFIPSLLGDLLEERQKIKRKMKATVDPLEKKLLDYRQRFIKILANSFYGYYGYAKARWYCKECAESVTAWGREYIEMVIRELEEKFGFKVLYADTDGLHATIPGADAETVKKKAKEFLKYINPKLPGLLELEYEGFYVRGFFVTKKKYAVIDEEGKITTRGLEIVRRDWSEIAKETQARVLEAILKHGDVEEAVRIVKEVTEKLSKYEVPPEKLVIHEQITRDLRDYKATGPHVAVAKRLAARGVKIRPGTVISYIVLKGSGRIGDRAIPADEFDPTKHRYDAEYYIENQVLPAVERILKAFGYRKEDLRYQKTKQVGSGAWLKVKGKKGTEAYVEQKLISEEDLNSAVDHHHHHH

SEQ ID NO: 69 - DNA, 2409 bp, Artificial Sequence
  Description of Artificial Sequence:Thermococcus species 9degreesN-7 mutant DNA polymerase, 9degreesN mutant
atgattctcgataccgactacatcaccgagaacgggaagcccgtgataagggtcttcaagaaggagaacggcgagtttaaaatcgagtacgacagaaccttcgagccctacttctacgcccttctgaaggacgattctgcgatagaggacgtcaagaaggtaaccgcaaagaggcacggaacggttgtcaaggtgaagcgcgccgagaaggtgcagaagaagttcctcggcaggccgatagaggtctggaagctctacttcaaccatcctcaggacgtcccggcgattcgagacaggatacgcgcccaccccgctgtcgttgacatctacgagtacgacatacccttcgccaagcgctacctcatcgacaagggcctgattccgatggagggcgacgaggagcttacgatgctcgccttcgcgatcgcaaccctctatcacgagggcgaggagttcggaaccgggccgattctcatgataagctacgccgacgggagcgaggcgagggtgataacctggaagaagattgaccttccgtacgttgacgtcgtctcgaccgagaaggagatgattaagcgcttcctccgcgtcgtcagggagaaggaccccgacgtgctcatcacctacaacggcgacaacttcgacttcgcctacctgaagaagcgctgtgaggaactcggaataaagttcacactcggcagggacgggagcgagccgaagatacagcgaatgggcgaccgctttgccgttgaggtgaagggcaggattcacttcgacctctaccccgtcataaggcgcacgataaacctcccgacctacacccttgaggccgtttacgaggccgtctttggaaagcccaaggagaaggtttacgcagaggagatagcgcaggcctgggagagcggggagggccttgaaagggttgcaagatactcgatggaggacgctaaggtgacctacgagctgggaagggagttcttcccgatggaggccgcaccgtcgaggcttataggccagagcctctgggacgtctcgcgctcgagcaccggaaatttggtggagtggttcctcctgcggaaggcctacaagaggaacgagctcgccccaaacaagcccgacgagagggagctcgcgagacggcgcgggggctacgctggcgggtacgttaaggaaccagagcggggattgtgggacaacattgtgtatttagacttccgctcgctgtatccttcaatcatcataacccacaacgtctcgccggataccctcaaccgcgagggctgtaaagagtacgacgtcgcccctgaggttggacacaagttctgcaaggacttccccggcttcataccaagcctcctgggagatttgctcgaggagaggcagaagataaagcggaagatgaaggcaacggttgacccgctggagaagaaactcctcgattacaggcagaggcgtatcaaaatcctcgccaacagcttctacggctactacggctacgccaaggcccggtggtactgcaaggagtgcgccgagagcgttacggcctggggaagggagtatatagaaatggttatccgggaactcgaagaaaaattcggttttaaagttctctatgccgatacagacggtctccatgctaccattcccggagcagacgctgaaacagtcaagaaaaaagcaaaggagttcttaaaatacattaatccaaaactgcccggcctgctcgaacttgagtacgagggcttctacgtgaggggcttcttcgtcacgaagaagaagtacgctgtgatagacgaggagggcaagataaccacgaggggtcttgagattgtgaggcgcgactggagcgagatagcgaaggagacccaggccagggtcttagaggcgatactcaagcacggtgacgtcgaggaggccgttaggatagtcaaggaagtgacggaaaagctgagcaagtatgaggtcccgcccgagaagctggtaatccacgagcagataacgcgcgatttgagggattacaaagccaccggcccgcacgttgccgttgcgaagaggctcgcggcgcgtggagtgaaaatccggcccggcacggtgataagctacatcgtcctaaagggctctggaaggataggcgacagggcgattccagctgatgagttcgacccgacgaagcaccgctacgatgcggaatactacatcgagaaccaggttctcccggcggtggagaggattctaaaagccttcggctatcggaaggaggatttgcgctaccagaagacgaagcaggtcggctcgggcgcgtggctgaaggtgaaggggaagaagggtaccgaagcttacgtagaacaaaaactcatctcagaagaggatctgaatagcgccgtcgaccatcatcatcatcatcattga

SEQ ID NO: 70 - protein, 802 aa, Artificial Sequence
  Description of Artificial Sequence:Thermococcus species 9degreesN-7 mutant DNA polymerase, 9degreesN mutant
MILDTDYITENGKPVIRVFKKENGEFKIEYDRTFEPYFYALLKDDSAIEDVKKVTAKRHGTVVKVKRAEKVQKKFLGRPIEVWKLYFNHPQDVPAIRDRIRAHPAVVDIYEYDIPFAKRYLIDKGLIPMEGDEELTMLAFAIATLYHEGEEFGTGPILMISYADGSEARVITWKKIDLPYVDVVSTEKEMIKRFLRVVREKDPDVLITYNGDNFDFAYLKKRCEELGIKFTLGRDGSEPKIQRMGDRFAVEVKGRIHFDLYPVIRRTINLPTYTLEAVYEAVFGKPKEKVYAEEIAQAWESGEGLERVARYSMEDAKVTYELGREFFPMEAAPSRLIGQSLWDVSRSSTGNLVEWFLLRKAYKRNELAPNKPDERELARRRGGYAGGYVKEPERGLWDNIVYLDFRSLYPSIIITHNVSPDTLNREGCKEYDVAPEVGHKFCKDFPGFIPSLLGDLLEERQKIKRKMKATVDPLEKKLLDYRQRRIKILANSFYGYYGYAKARWYCKECAESVTAWGREYIEMVIRELEEKFGFKVLYADTDGLHATIPGADAETVKKKAKEFLKYINPKLPGLLELEYEGFYVRGFFVTKKKYAVIDEEGKITTRGLEIVRRDWSEIAKETQARVLEAILKHGDVEEAVRIVKEVTEKLSKYEVPPEKLVIHEQITRDLRDYKATGPHVAVAKRLAARGVKIRPGTVISYIVLKGSGRIGDRAIPADEFDPTKHRYDAEYYIENQVLPAVERILKAFGYRKEDLRYQKTKQVGSGAWLKVKGKKGTEAYVEQKLISEEDLNSAVDHHHHHH

SEQ ID NO: 71 - DNA, 2409 bp, Artificial Sequence
  Description of Artificial Sequence:Thermococcus species 9degreesN-7 mutant DNA polymerase, 9degreesN mutant
atgattctcgataccgactacatcaccgagaacgggaagcccgtgataagggtcttcaagaaggagaacggcgagtttaaaatcgagtacgacagaaccttcgagccctacttctacgcccttctgaaggacgattctgcgatagaggacgtcaagaaggtaaccgcaaagaggcacggaacggttgtcaaggtgaagcgcgccgagaaggtgcagaagaagttcctcggcaggccgatagaggtctggaagctctacttcaaccatcctcaggacgtcccggcgattcgagacaggatacgcgcccaccccgctgtcgttgacatctacgagtacgacatacccttcgccaagcgctacctcatcgacaagggcctgattccgatggagggcgacgaggagcttacgatgctcgccttcgcgatcgcaaccctctatcacgagggcgaggagttcggaaccgggccgattctcatgataagctacgccgacgggagcgaggcgagggtgataacctggaagaagattgaccttccgtacgttgacgtcgtctcgaccgagaaggagatgattaagcgcttcctccgcgtcgtcagggagaaggaccccgacgtgctcatcacctacaacggcgacaacttcgacttcgcctacctgaagaagcgctgtgaggaactcggaataaagttcacactcggcagggacgggagcgagccgaagatacagcgaatgggcgaccgctttgccgttgaggtgaagggcaggattcacttcgacctctaccccgtcataaggcgcacgataaacctcccgacctacacccttgaggccgtttacgaggccgtctttggaaagcccaaggagaaggtttacgcagaggagatagcgcaggcctgggagagcggggagggccttgaaagggttgcaagatactcgatggaggacgctaaggtgacctacgagctgggaagggagttcttcccgatggaggcctgtatatcgaggcttataggccagagcctctgggacgtctcgcgctcgagcaccggaaatttggtggagtggttcctcctgcggaaggcctacaagaggaacgagctcgccccaaacaagcccgacgagagggagctcgcgagacggcgcgggggctacgctggcgggtacgttaaggaaccagagcggggattgtgggacaacattgtgtatttagacttccgctcgctgtatccttcaatcatcataacccacaacgtctcgccggataccctcaaccgcgagggctgtaaagagtacgacgtcgcccctgaggttggacacaagttctgcaaggacttccccggcttcataccaagcctcctgggagatttgctcgaggagaggcagaagataaagcggaagatgaaggcaacggttgacccgctggagaagaaactcctcgattacaggcagaggggaatcaaaatcctcgccaacagcttctacggctactacggctacgccaaggcccggtggtactgcaaggagtgcgccgagagcgttacggcctggggaagggagtatatagaaatggttatccgggaactcgaagaaaaattcggttttaaagttctctatgccgatacagacggtctccatgctaccattcccggagcagacgctgaaacagtcaagaaaaaagcaaaggagttcttaaaatacattaatccaaaactgcccggcctgctcgaacttgagtacgagggcttctacgtgaggggcttcttcgtcacgaagaagaagtacgctgtgatagacgaggagggcaagataaccacgaggggtcttgagattgtgaggcgcgactggagcgagatagcgaaggagacccaggccagggtcttagaggcgatactcaagcacggtgacgtcgaggaggccgttaggatagtcaaggaagtgacggaaaagctgagcaagtatgaggtcccgcccgagaagctggtaatccacgagcagataacgcgcgatttgagggattacaaagccaccggcccgcacgttgccgttgcgaagaggctcgcggcgcgtggagtgaaaatccggcccggcacggtgataagctacatcgtcctaaagggctctggaaggataggcgacagggcgattccagctgatgagttcgacccgacgaagcaccgctacgatgcggaatactacatcgagaaccaggttctcccggcggtggagaggattctaaaagccttcggctatcggaaggaggatttgcgctaccagaagacgaagcaggtcggctcgggcgcgtggctgaaggtgaaggggaagaagggtaccgaagcttacgtagaacaaaaactcatctcagaagaggatctgaatagcgccgtcgaccatcatcatcatcatcattga

SEQ ID NO: 72 - protein, 802 aa, Artificial Sequence
  Description of Artificial Sequence:Thermococcus species 9degreesN-7 mutant DNA polymerase, 9degreesN mutant
MILDTDYITENGKPVIRVFKKENGEFKIEYDRTFEPYFYALLKDDSAIEDVKKVTAKRHGTVVKVKRAEKVQKKFLGRPIEVWKLYFNHPQDVPAIRDRIRAHPAVVDIYEYDIPFAKRYLIDKGLIPMEGDEELTMLAFAIATLYHEGEEFGTGPILMISYADGSEARVITWKKIDLPYVDVVSTEKEMIKRFLRVVREKDPDVLITYNGDNFDFAYLKKRCEELGIKFTLGRDGSEPKIQRMGDRFAVEVKGRIHFDLYPVIRRTINLPTYTLEAVYEAVFGKPKEKVYAEEIAQAWESGEGLERVARYSMEDAKVTYELGREFFPMEACISRLIGQSLWDVSRSSTGNLVEWFLLRKAYKRNELAPNKPDERELARRRGGYAGGYVKEPERGLWDNIVYLDFRSLYPSIIITHNVSPDTLNREGCKEYDVAPEVGHKFCKDFPGFIPSLLGDLLEERQKIKRKMKATVDPLEKKLLDYRQRGIKILANSFYGYYGYAKARWYCKECAESVTAWGREYIEMVIRELEEKFGFKVLYADTDGLHATIPGADAETVKKKAKEFLKYINPKLPGLLELEYEGFYVRGFFVTKKKYAVIDEEGKITTRGLEIVRRDWSEIAKETQARVLEAILKHGDVEEAVRIVKEVTEKLSKYEVPPEKLVIHEQITRDLRDYKATGPHVAVAKRLAARGVKIRPGTVISYIVLKGSGRIGDRAIPADEFDPTKHRYDAEYYIENQVLPAVERILKAFGYRKEDLRYQKTKQVGSGAWLKVKGKKGTEAYVEQKLISEEDLNSAVDHHHHHH

SEQ ID NO: 73 - DNA, 2409 bp, Artificial Sequence
  Description of Artificial Sequence:Thermococcus species 9degreesN-7 mutant DNA polymerase, 9degreesN mutant
atgattctcgataccgactacatcaccgagaacgggaagcccgtgataagggtcttcaagaaggagaacggcgagtttaaaatcgagtacgacagaaccttcgagccctacttctacgcccttctgaaggacgattctgcgatagaggacgtcaagaaggtaaccgcaaagaggcacggaacggttgtcaaggtgaagcgcgccgagaaggtgcagaagaagttcctcggcaggccgatagaggtctggaagctctacttcaaccatcctcaggacgtcccggcgattcgagacaggatacgcgcccaccccgctgtcgttgacatctacgagtacgacatacccttcgccaagcgctacctcatcgacaagggcctgattccgatggagggcgacgaggagcttacgatgctcgccttcgcgatcgcaaccctctatcacgagggcgaggagttcggaaccgggccgattctcatgataagctacgccgacgggagcgaggcgagggtgataacctggaagaagattgaccttccgtacgttgacgtcgtctcgaccgagaaggagatgattaagcgcttcctccgcgtcgtcagggagaaggaccccgacgtgctcatcacctacaacggcgacaacttcgacttcgcctacctgaagaagcgctgtgaggaactcggaataaagttcacactcggcagggacgggagcgagccgaagatacagcgaatgggcgaccgctttgccgttgaggtgaagggcaggattcacttcgacctctaccccgtcataaggcgcacgataaacctcccgacctacacccttgaggccgtttacgaggccgtctttggaaagcccaaggagaaggtttacgcagaggagatagcgcaggcctgggagagcggggagggccttgaaagggttgcaagatactcgatggaggacgctaaggtgacctacgagctgggaagggagttcttcccgtcggaggcccagctttcgaggtggataggccagagcctctgggacgtctcgcgctcgagcaccggaaatttggtggagtggttcctcctgcggaaggcctacaagaggaacgagctcgccccaaacaagcccgacgagagggagctcgcgagacggcgcgggggctacgctggcgggtacgttaaggaaccagagcggggattgtgggacaacattgtgtatttagacttccgctcgctgtatccttcaatcatcataacccacaacgtctcgccggataccctcaaccgcgagggctgtaaagagtacgacgtcgcccctgaggttggacacaagttctgcaaggacttccccggcttcataccaagcctcctgggagatttgctcgaggagaggcagaagataaagcggaagatgaaggcaacggttgacccgctggagaagaaactcctcgattacaggcagaggcttataaaaatcctcgccaacagcttctacggctactacggctacgccaaggcccggtggtactgcaaggagtgcgccgagagcgttacggcctggggaagggagtatatagaaatggttatccgggaactcgaagaaaaattcggttttaaagttctctatgccgatacagacggtctccatgctaccattcccggagcagacgctgaaacagtcaagaaaaaagcaaaggagttcttaaaatacattaatccaaaactgcccggcctgctcgaacttgagtacgagggcttctacgtgaggggcttcttcgtcacgaagaagaagtacgctgtgatagacgaggagggcaagataaccacgaggggtcttgagattgtgaggcgcgactggagcgagatagcgaaggagacccaggccagggtcttagaggcgatactcaagcacggtgacgtcgaggaggccgttaggatagtcaaggaagtgacggaaaagctgagcaagtatgaggtcccgcccgagaagctggtaatccacgagcagataacgcgcgatttgagggattacaaagccaccggcccgcacgttgccgttgcgaagaggctcgcggcgcgtggagtgaaaatccggcccggcacggtgataagctacatcgtcctaaagggctctggaaggataggcgacagggcgattccagctgatgagttcgacccgacgaagcaccgctacgatgcggaatactacatcgagaaccaggttctcccggcggtggagaggattctaaaagccttcggctatcggaaggaggatttgcgctaccagaagacgaagcaggtcggctcgggcgcgtggctgaaggtgaaggggaagaagggtaccgaagcttacgtagaacaaaaactcatctcagaagaggatctgaatagcgccgtcgaccatcatcatcatcatcattga

SEQ ID NO: 74 - protein, 802 aa, Artificial Sequence
  Description of Artificial Sequence:Thermococcus species 9degreesN-7 mutant DNA polymerase, 9degreesN mutant
MILDTDYITENGKPVIRVFKKENGEFKIEYDRTFEPYFYALLKDDSAIEDVKKVTAKRHGTVVKVKRAEKVQKKFLGRPIEVWKLYFNHPQDVPAIRDRIRAHPAVVDIYEYDIPFAKRYLIDKGLIPMEGDEELTMLAFAIATLYHEGEEFGTGPILMISYADGSEARVITWKKIDLPYVDVVSTEKEMIKRFLRVVREKDPDVLITYNGDNFDFAYLKKRCEELGIKFTLGRDGSEPKIQRMGDRFAVEVKGRIHFDLYPVIRRTINLPTYTLEAVYEAVFGKPKEKVYAEEIAQAWESGEGLERVARYSMEDAKVTYELGREFFPSEAQLSRWIGQSLWDVSRSSTGNLVEWFLLRKAYKRNELAPNKPDERELARRRGGYAGGYVKEPERGLWDNIVYLDFRSLYPSIIITHNVSPDTLNREGCKEYDVAPEVGHKFCKDFPGFIPSLLGDLLEERQKIKRKMKATVDPLEKKLLDYRQRLIKILANSFYGYYGYAKARWYCKECAESVTAWGREYIEMVIRELEEKFGFKVLYADTDGLHATIPGADAETVKKKAKEFLKYINPKLPGLLELEYEGFYVRGFFVTKKKYAVIDEEGKITTRGLEIVRRDWSEIAKETQARVLEAILKHGDVEEAVRIVKEVTEKLSKYEVPPEKLVIHEQITRDLRDYKATGPHVAVAKRLAARGVKIRPGTVISYIVLKGSGRIGDRAIPADEFDPTKHRYDAEYYIENQVLPAVERILKAFGYRKEDLRYQKTKQVGSGAWLKVKGKKGTEAYVEQKLISEEDLNSAVDHHHHHH

SEQ ID NO: 75 - DNA, 2409 bp, Artificial Sequence
  Description of Artificial Sequence:Thermococcus species 9degreesN-7 mutant DNA polymerase, 9degreesN mutant
atgattctcgataccgactacatcaccgagaacgggaagcccgtgataagggtcttcaagaaggagaacggcgagtttaaaatcgagtacgacagaaccttcgagccctacttctacgcccttctgaaggacgattctgcgatagaggacgtcaagaaggtaaccgcaaagaggcacggaacggttgtcaaggtgaagcgcgccgagaaggtgcagaagaagttcctcggcaggccgatagaggtctggaagctctacttcaaccatcctcaggacgtcccggcgattcgagacaggatacgcgcccaccccgctgtcgttgacatctacgagtacgacatacccttcgccaagcgctacctcatcgacaagggcctgattccgatggagggcgacgaggagcttacgatgctcgccttcgcgatcgcaaccctctatcacgagggcgaggagttcggaaccgggccgattctcatgataagctacgccgacgggagcgaggcgagggtgataacctggaagaagattgaccttccgtacgttgacgtcgtctcgaccgagaaggagatgattaagcgcttcctccgcgtcgtcagggagaaggaccccgacgtgctcatcacctacaacggcgacaacttcgacttcgcctacctgaagaagcgctgtgaggaactcggaataaagttcacactcggcagggacgggagcgagccgaagatacagcgaatgggcgaccgctttgccgttgaggtgaagggcaggattcacttcgacctctaccccgtcataaggcgcacgataaacctcccgacctacacccttgaggccgtttacgaggccgtctttggaaagcccaaggagaaggtttacgcagaggagatagcgcaggcctgggagagcggggagggccttgaaagggttgcaagatactcgatggaggacgctaaggtgacctacgagctgggaagggagttcttcccgactgaggcccagctttcgaggagaataggccagagcctctgggacgtctcgcgctcgagcaccggaaatttggtggagtggttcctcctgcggaaggcctacaagaggaacgagctcgccccaaacaagcccgacgagagggagctcgcgagacggcgcgggggctacgctggcgggtacgttaaggaaccagagcggggattgtgggacaacattgtgtatttagacttccgctcgctgtatccttcaatcatcataacccacaacgtctcgccggataccctcaaccgcgagggctgtaaagagtacgacgtcgcccctgaggttggacacaagttctgcaaggacttccccggcttcataccaagcctcctgggagatttgctcgaggagaggcagaagataaagcggaagatgaaggcaacggttgacccgctggagaagaaactcctcgattacaggcagaggcttataaaaatcctcgccaacagcttctacggctactacggctacgccaaggcccggtggtactgcaaggagtgcgccgagagcgttacggcctggggaagggagtatatagaaatggttatccgggaactcgaagaaaaattcggttttaaagttctctatgccgatacagacggtctccatgctaccattcccggagcagacgctgaaacagtcaagaaaaaagcaaaggagttcttaaaatacattaatccaaaactgcccggcctgctcgaacttgagtacgagggcttctacgtgaggggcttcttcgtcacgaagaagaagtacgctgtgatagacgaggagggcaagataaccacgaggggtcttgagattgtgaggcgcgactggagcgagatagcgaaggagacccaggccagggtcttagaggcgatactcaagcacggtgacgtcgaggaggccgttaggatagtcaaggaagtgacggaaaagctgagcaagtatgaggtcccgcccgagaagctggtaatccacgagcagataacgcgcgatttgagggattacaaagccaccggcccgcacgttgccgttgcgaagaggctcgcggcgcgtggagtgaaaatccggcccggcacggtgataagctacatcgtcctaaagggctctggaaggataggcgacagggcgattccagctgatgagttcgacccgacgaagcaccgctacgatgcggaatactacatcgagaaccaggttctcccggcggtggagaggattctaaaagccttcggctatcggaaggaggatttgcgctaccagaagacgaagcaggtcggctcgggcgcgtggctgaaggtgaaggggaagaagggtaccgaagcttacgtagaacaaaaactcatctcagaagaggatctgaatagcgccgtcgaccatcatcatcatcatcattga

SEQ ID NO: 76 - protein, 802 aa, Artificial Sequence
  Description of Artificial Sequence:Thermococcus species 9degreesN-7 mutant DNA polymerase, 9degreesN mutant
MILDTDYITENGKPVIRVFKKENGEFKIEYDRTFEPYFYALLKDDSAIEDVKKVTAKRHGTVVKVKRAEKVQKKFLGRPIEVWKLYFNHPQDVPAIRDRIRAHPAVVDIYEYDIPFAKRYLIDKGLIPMEGDEELTMLAFAIATLYHEGEEFGTGPILMISYADGSEARVITWKKIDLPYVDVVSTEKEMIKRFLRVVREKDPDVLITYNGDNFDFAYLKKRCEELGIKFTLGRDGSEPKIQRMGDRFAVEVKGRIHFDLYPVIRRTINLPTYTLEAVYEAVFGKPKEKVYAEEIAQAWESGEGLERVARYSMEDAKVTYELGREFFPTEAQLSRRIGQSLWDVSRSSTGNLVEWFLLRKAYKRNELAPNKPDERELARRRGGYAGGYVKEPERGLWDNIVYLDFRSLYPSIIITHNVSPDTLNREGCKEYDVAPEVGHKFCKDFPGFIPSLLGDLLEERQKIKRKMKATVDPLEKKLLDYRQRLIKILANSFYGYYGYAKARWYCKECAESVTAWGREYIEMVIRELEEKFGFKVLYADTDGLHATIPGADAETVKKKAKEFLKYINPKLPGLLELEYEGFYVRGFFVTKKKYAVIDEEGKITTRGLEIVRRDWSEIAKETQARVLEAILKHGDVEEAVRIVKEVTEKLSKYEVPPEKLVIHEQITRDLRDYKATGPHVAVAKRLAARGVKIRPGTVISYIVLKGSGRIGDRAIPADEFDPTKHRYDAEYYIENQVLPAVERILKAFGYRKEDLRYQKTKQVGSGAWLKVKGKKGTEAYVEQKLISEEDLNSAVDHHHHHH

SEQ ID NO: 77 - DNA, 2409 bp, Artificial Sequence
  Description of Artificial Sequence:Thermococcus species 9degreesN-7 mutant DNA polymerase, 9degreesN mutant
atgattctcgataccgactacatcaccgagaacgggaagcccgtgataagggtcttcaagaaggagaacggcgagtttaaaatcgagtacgacagaaccttcgagccctacttctacgcccttctgaaggacgattctgcgatagaggacgtcaagaaggtaaccgcaaagaggcacggaacggttgtcaaggtgaagcgcgccgagaaggtgcagaagaagttcctcggcaggccgatagaggtctggaagctctacttcaaccatcctcaggacgtcccggcgattcgagacaggatacgcgcccaccccgctgtcgttgacatctacgagtacgacatacccttcgccaagcgctacctcatcgacaagggcctgattccgatggagggcgacgaggagcttacgatgctcgccttcgcgatcgcaaccctctatcacgagggcgaggagttcggaaccgggccgattctcatgataagctacgccgacgggagcgaggcgagggtgataacctggaagaagattgaccttccgtacgttgacgtcgtctcgaccgagaaggagatgattaagcgcttcctccgcgtcgtcagggagaaggaccccgacgtgctcatcacctacaacggcgacaacttcgacttcgcctacctgaagaagcgctgtgaggaactcggaataaagttcacactcggcagggacgggagcgagccgaagatacagcgaatgggcgaccgctttgccgttgaggtgaagggcaggattcacttcgacctctaccccgtcataaggcgcacgataaacctcccgacctacacccttgaggccgtttacgaggccgtctttggaaagcccaaggagaaggtttacgcagaggagatagcgcaggcctgggagagcggggagggccttgaaagggttgcaagatactcgatggaggacgctaaggtgacctacgagctgggaagggagttcttcccgtcagaggcccagctttcgaggcgtataggccagagcctctgggacgtctcgcgctcgagcaccggaaatttggtggagtggttcctcctgcggaaggcctacaagaggaacgagctcgccccaaacaagcccgacgagagggagctcgcgagacggcgcgggggctacgctggcgggtacgttaaggaaccagagcggggattgtgggacaacattgtgtatttagacttccgctcgctgtatccttcaatcatcataacccacaacgtctcgccggataccctcaaccgcgagggctgtaaagagtacgacgtcgcccctgaggttggacacaagttctgcaaggacttccccggcttcataccaagcctcctgggagatttgctcgaggagaggcagaagataaagcggaagatgaaggcaacggttgacccgctggagaagaaactcctcgattacaggcagaggcttataaaaatcctcgccaacagcttctacggctactacggctacgccaaggcccggtggtactgcaaggagtgcgccgagagcgttacggcctggggaagggagtatatagaaatggttatccgggaactcgaagaaaaattcggttttaaagttctctatgccgatacagacggtctccatgctaccattcccggagcagacgctgaaacagtcaagaaaaaagcaaaggagttcttaaaatacattaatccaaaactgcccggcctgctcgaacttgagtacgagggcttctacgtgaggggcttcttcgtcacgaagaagaagtacgctgtgatagacgaggagggcaagataaccacgaggggtcttgagattgtgaggcgcgactggagcgagatagcgaaggagacccaggccagggtcttagaggcgatactcaagcacggtgacgtcgaggaggccgttaggatagtcaaggaagtgacggaaaagctgagcaagtatgaggtcccgcccgagaagctggtaatccacgagcagataacgcgcgatttgagggattacaaagccaccggcccgcacgttgccgttgcgaagaggctcgcggcgcgtggagtgaaaatccggcccggcacggtgataagctacatcgtcctaaagggctctggaaggataggcgacagggcgattccagctgatgagttcgacccgacgaagcaccgctacgatgcggaatactacatcgagaaccaggttctcccggcggtggagaggattctaaaagccttcggctatcggaaggaggatttgcgctaccagaagacgaagcaggtcggctcgggcgcgtggctgaaggtgaaggggaagaagggtaccgaagcttacgtagaacaaaaactcatctcagaagaggatctgaatagcgccgtcgaccatcatcatcatcatcattga

SEQ ID NO: 78 - protein, 802 aa, Artificial Sequence
  Description of Artificial Sequence:Thermococcus species 9degreesN-7 mutant DNA polymerase, 9degreesN mutant
MILDTDYITENGKPVIRVFKKENGEFKIEYDRTFEPYFYALLKDDSAIEDVKKVTAKRHGTVVKVKRAEKVQKKFLGRPIEVWKLYFNHPQDVPAIRDRIRAHPAVVDIYEYDIPFAKRYLIDKGLIPMEGDEELTMLAFAIATLYHEGEEFGTGPILMISYADGSEARVITWKKIDLPYVDVVSTEKEMIKRFLRVVREKDPDVLITYNGDNFDFAYLKKRCEELGIKFTLGRDGSEPKIQRMGDRFAVEVKGRIHFDLYPVIRRTINLPTYTLEAVYEAVFGKPKEKVYAEEIAQAWESGEGLERVARYSMEDAKVTYELGREFFPSEAQLSRRIGQSLWDVSRSSTGNLVEWFLLRKAYKRNELAPNKPDERELARRRGGYAGGYVKEPERGLWDNIVYLDFRSLYPSIIITHNVSPDTLNREGCKEYDVAPEVGHKFCKDFPGFIPSLLGDLLEERQKIKRKMKATVDPLEKKLLDYRQRLIKILANSFYGYYGYAKARWYCKECAESVTAWGREYIEMVIRELEEKFGFKVLYADTDGLHATIPGADAETVKKKAKEFLKYINPKLPGLLELEYEGFYVRGFFVTKKKYAVIDEEGKITTRGLEIVRRDWSEIAKETQARVLEAILKHGDVEEAVRIVKEVTEKLSKYEVPPEKLVIHEQITRDLRDYKATGPHVAVAKRLAARGVKIRPGTVISYIVLKGSGRIGDRAIPADEFDPTKHRYDAEYYIENQVLPAVERILKAFGYRKEDLRYQKTKQVGSGAWLKVKGKKGTEAYVEQKLISEEDLNSAVDHHHHHH

SEQ ID NO: 79 - DNA, 2409 bp, Artificial Sequence
  Description of Artificial Sequence:Thermococcus species 9degreesN-7 mutant DNA polymerase, 9degreesN mutant
atgattctcgataccgactacatcaccgagaacgggaagcccgtgataagggtcttcaagaaggagaacggcgagtttaaaatcgagtacgacagaaccttcgagccctacttctacgcccttctgaaggacgattctgcgatagaggacgtcaagaaggtaaccgcaaagaggcacggaacggttgtcaaggtgaagcgcgccgagaaggtgcagaagaagttcctcggcaggccgatagaggtctggaagctctacttcaaccatcctcaggacgtcccggcgattcgagacaggatacgcgcccaccccgctgtcgttgacatctacgagtacgacatacccttcgccaagcgctacctcatcgacaagggcctgattccgatggagggcgacgaggagcttacgatgctcgccttcgcgatcgcaaccctctatcacgagggcgaggagttcggaaccgggccgattctcatgataagctacgccgacgggagcgaggcgagggtgataacctggaagaagattgaccttccgtacgttgacgtcgtctcgaccgagaaggagatgattaagcgcttcctccgcgtcgtcagggagaaggaccccgacgtgctcatcacctacaacggcgacaacttcgacttcgcctacctgaagaagcgctgtgaggaactcggaataaagttcacactcggcagggacgggagcgagccgaagatacagcgaatgggcgaccgctttgccgttgaggtgaagggcaggattcacttcgacctctaccccgtcataaggcgcacgataaacctcccgacctacacccttgaggccgtttacgaggccgtctttggaaagcccaaggagaaggtttacgcagaggagatagcgcaggcctgggagagcggggagggccttgaaagggttgcaagatactcgatggaggacgctaaggtgacctacgagctgggaagggagttcttcccgatcgaggcccagctttcgaggacgataggccagagcctctgggacgtctcgcgctcgagcaccggaaatttggtggagtggttcctcctgcggaaggcctacaagaggaacgagctcgccccaaacaagcccgacgagagggagctcgcgagacggcgcgggggctacgctggcgggtacgttaaggaaccagagcggggattgtgggacaacattgtgtatttagacttccgctcgctgtatccttcaatcatcataacccacaacgtctcgccggataccctcaaccgcgagggctgtaaagagtacgacgtcgcccctgaggttggacacaagttctgcaaggacttccccggcttcataccaagcctcctgggagatttgctcgaggagaggcagaagataaagcggaagatgaaggcaacggttgacccgctggagaagaaactcctcgattacaggcagaggcttataaaaatcctcgccaacagcttctacggctactacggctacgccaaggcccggtggtactgcaaggagtgcgccgagagcgttacggcctggggaagggagtatatagaaatggttatccgggaactcgaagaaaaattcggttttaaagttctctatgccgatacagacggtctccatgctaccattcccggagcagacgctgaaacagtcaagaaaaaagcaaaggagttcttaaaatacattaatccaaaactgcccggcctgctcgaacttgagtacgagggcttctacgtgaggggcttcttcgtcacgaagaagaagtacgctgtgatagacgaggagggcaagataaccacgaggggtcttgagattgtgaggcgcgactggagcgagatagcgaaggagacccaggccagggtcttagaggcgatactcaagcacggtgacgtcgaggaggccgttaggatagtcaaggaagtgacggaaaagctgagcaagtatgaggtcccgcccgagaagctggtaatccacgagcagataacgcgcgatttgagggattacaaagccaccggcccgcacgttgccgttgcgaagaggctcgcggcgcgtggagtgaaaatccggcccggcacggtgataagctacatcgtcctaaagggctctggaaggataggcgacagggcgattccagctgatgagttcgacccgacgaagcaccgctacgatgcggaatactacatcgagaaccaggttctcccggcggtggagaggattctaaaagccttcggctatcggaaggaggatttgcgctaccagaagacgaagcaggtcggctcgggcgcgtggctgaaggtgaaggggaagaagggtaccgaagcttacgtagaacaaaaactcatctcagaagaggatctgaatagcgccgtcgaccatcatcatcatcatcattga

SEQ ID NO: 80 - protein, 802 aa, Artificial Sequence
  Description of Artificial Sequence:Thermococcus species 9degreesN-7 mutant DNA polymerase, 9degreesN mutant
MILDTDYITENGKPVIRVFKKENGEFKIEYDRTFEPYFYALLKDDSAIEDVKKVTAKRHGTVVKVKRAEKVQKKFLGRPIEVWKLYFNHPQDVPAIRDRIRAHPAVVDIYEYDIPFAKRYLIDKGLIPMEGDEELTMLAFAIATLYHEGEEFGTGPILMISYADGSEARVITWKKIDLPYVDVVSTEKEMIKRFLRVVREKDPDVLITYNGDNFDFAYLKKRCEELGIKFTLGRDGSEPKIQRMGDRFAVEVKGRIHFDLYPVIRRTINLPTYTLEAVYEAVFGKPKEKVYAEEIAQAWESGEGLERVARYSMEDAKVTYELGREFFPIEAQLSRTIGQSLWDVSRSSTGNLVEWFLLRKAYKRNELAPNKPDERELARRRGGYAGGYVKEPERGLWDNIVYLDFRSLYPSIIITHNVSPDTLNREGCKEYDVAPEVGHKFCKDFPGFIPSLLGDLLEERQKIKRKMKATVDPLEKKLLDYRQRLIKILANSFYGYYGYAKARWYCKECAESVTAWGREYIEMVIRELEEKFGFKVLYADTDGLHATIPGADAETVKKKAKEFLKYINPKLPGLLELEYEGFYVRGFFVTKKKYAVIDEEGKITTRGLEIVRRDWSEIAKETQARVLEAILKHGDVEEAVRIVKEVTEKLSKYEVPPEKLVIHEQITRDLRDYKATGPHVAVAKRLAARGVKIRPGTVISYIVLKGSGRIGDRAIPADEFDPTKHRYDAEYYIENQVLPAVERILKAFGYRKEDLRYQKTKQVGSGAWLKVKGKKGTEAYVEQKLISEEDLNSAVDHHHHHH

SEQ ID NO: 81 - DNA, 2409 bp, Artificial Sequence
  Description of Artificial Sequence:Thermococcus species 9degreesN-7 mutant DNA polymerase, 9degreesN mutant
atgattctcgataccgactacatcaccgagaacgggaagcccgtgataagggtcttcaagaaggagaacggcgagtttaaaatcgagtacgacagaaccttcgagccctacttctacgcccttctgaaggacgattctgcgatagaggacgtcaagaaggtaaccgcaaagaggcacggaacggttgtcaaggtgaagcgcgccgagaaggtgcagaagaagttcctcggcaggccgatagaggtctggaagctctacttcaaccatcctcaggacgtcccggcgattcgagacaggatacgcgcccaccccgctgtcgttgacatctacgagtacgacatacccttcgccaagcgctacctcatcgacaagggcctgattccgatggagggcgacgaggagcttacgatgctcgccttcgcgatcgcaaccctctatcacgagggcgaggagttcggaaccgggccgattctcatgataagctacgccgacgggagcgaggcgagggtgataacctggaagaagattgaccttccgtacgttgacgtcgtctcgaccgagaaggagatgattaagcgcttcctccgcgtcgtcagggagaaggaccccgacgtgctcatcacctacaacggcgacaacttcgacttcgcctacctgaagaagcgctgtgaggaactcggaataaagttcacactcggcagggacgggagcgagccgaagatacagcgaatgggcgaccgctttgccgttgaggtgaagggcaggattcacttcgacctctaccccgtcataaggcgcacgataaacctcccgacctacacccttgaggccgtttacgaggccgtctttggaaagcccaaggagaaggtttacgcagaggagatagcgcaggcctgggagagcggggagggccttgaaagggttgcaagatactcgatggaggacgctaaggtgacctacgagctgggaagggagttcttcccgatggaggcccagctttcgaggaaaataggccagagcctctgggacgtctcgcgctcgagcaccggaaatttggtggagtggttcctcctgcggaaggcctacaagaggaacgagctcgccccaaacaagcccgacgagagggagctcgcgagacggcgcgggggctacgctggcgggtacgttaaggaaccagagcggggattgtgggacaacattgtgtatttagacttccgctcgctgtatccttcaatcatcataacccacaacgtctcgccggataccctcaaccgcgagggctgtaaagagtacgacgtcgcccctgaggttggacacaagttctgcaaggacttccccggcttcataccaagcctcctgggagatttgctcgaggagaggcagaagataaagcggaagatgaaggcaacggttgacccgctggagaagaaactcctcgattacaggcagaggtttatcaaaatcctcgccaacagcttctacggctactacggctacgccaaggcccggtggtactgcaaggagtgcgccgagagcgttacggcctggggaagggagtatatagaaatggttatccgggaactcgaagaaaaattcggttttaaagttctctatgccgatacagacggtctccatgctaccattcccggagcagacgctgaaacagtcaagaaaaaagcaaaggagttcttaaaatacattaatccaaaactgcccggcctgctcgaacttgagtacgagggcttctacgtgaggggcttcttcgtcacgaagaagaagtacgctgtgatagacgaggagggcaagataaccacgaggggtcttgagattgtgaggcgcgactggagcgagatagcgaaggagacccaggccagggtcttagaggcgatactcaagcacggtgacgtcgaggaggccgttaggatagtcaaggaagtgacggaaaagctgagcaagtatgaggtcccgcccgagaagctggtaatccacgagcagataacgcgcgatttgagggattacaaagccaccggcccgcacgttgccgttgcgaagaggctcgcggcgcgtggagtgaaaatccggcccggcacggtgataagctacatcgtcctaaagggctctggaaggataggcgacagggcgattccagctgatgagttcgacccgacgaagcaccgctacgatgcggaatactacatcgagaaccaggttctcccggcggtggagaggattctaaaagccttcggctatcggaaggaggatttgcgctaccagaagacgaagcaggtcggctcgggcgcgtggctgaaggtgaaggggaagaagggtaccgaagcttacgtagaacaaaaactcatctcagaagaggatctgaatagcgccgtcgaccatcatcatcatcatcattga

SEQ ID NO: 82 - protein, 802 aa, Artificial Sequence
  Description of Artificial Sequence:Thermococcus species 9degreesN-7 mutant DNA polymerase, 9degreesN mutant
MILDTDYITENGKPVIRVFKKENGEFKIEYDRTFEPYFYALLKDDSAIEDVKKVTAKRHGTVVKVKRAEKVQKKFLGRPIEVWKLYFNHPQDVPAIRDRIRAHPAVVDIYEYDIPFAKRYLIDKGLIPMEGDEELTMLAFAIATLYHEGEEFGTGPILMISYADGSEARVITWKKIDLPYVDVVSTEKEMIKRFLRVVREKDPDVLITYNGDNFDFAYLKKRCEELGIKFTLGRDGSEPKIQRMGDRFAVEVKGRIHFDLYPVIRRTINLPTYTLEAVYEAVFGKPKEKVYAEEIAQAWESGEGLERVARYSMEDAKVTYELGREFFPMEAQLSRKIGQSLWDVSRSSTGNLVEWFLLRKAYKRNELAPNKPDERELARRRGGYAGGYVKEPERGLWDNIVYLDFRSLYPSIIITHNVSPDTLNREGCKEYDVAPEVGHKFCKDFPGFIPSLLGDLLEERQKIKRKMKATVDPLEKKLLDYRQRFIKILANSFYGYYGYAKARWYCKECAESVTAWGREYIEMVIRELEEKFGFKVLYADTDGLHATIPGADAETVKKKAKEFLKYINPKLPGLLELEYEGFYVRGFFVTKKKYAVIDEEGKITTRGLEIVRRDWSEIAKETQARVLEAILKHGDVEEAVRIVKEVTEKLSKYEVPPEKLVIHEQITRDLRDYKATGPHVAVAKRLAARGVKIRPGTVISYIVLKGSGRIGDRAIPADEFDPTKHRYDAEYYIENQVLPAVERILKAFGYRKEDLRYQKTKQVGSGAWLKVKGKKGTEAYVEQKLISEEDLNSAVDHHHHHH

SEQ ID NO: 83 - DNA, 2409 bp, Artificial Sequence
  Description of Artificial Sequence:Thermococcus species 9degreesN-7 mutant DNA polymerase, 9degreesN mutant
atgattctcgataccgactacatcaccgagaacgggaagcccgtgataagggtcttcaagaaggagaacggcgagtttaaaatcgagtacgacagaaccttcgagccctacttctacgcccttctgaaggacgattctgcgatagaggacgtcaagaaggtaaccgcaaagaggcacggaacggttgtcaaggtgaagcgcgccgagaaggtgcagaagaagttcctcggcaggccgatagaggtctggaagctctacttcaaccatcctcaggacgtcccggcgattcgagacaggatacgcgcccaccccgctgtcgttgacatctacgagtacgacatacccttcgccaagcgctacctcatcgacaagggcctgattccgatggagggcgacgaggagcttacgatgctcgccttcgcgatcgcaaccctctatcacgagggcgaggagttcggaaccgggccgattctcatgataagctacgccgacgggagcgaggcgagggtgataacctggaagaagattgaccttccgtacgttgacgtcgtctcgaccgagaaggagatgattaagcgcttcctccgcgtcgtcagggagaaggaccccgacgtgctcatcacctacaacggcgacaacttcgacttcgcctacctgaagaagcgctgtgaggaactcggaataaagttcacactcggcagggacgggagcgagccgaagatacagcgaatgggcgaccgctttgccgttgaggtgaagggcaggattcacttcgacctctaccccgtcataaggcgcacgataaacctcccgacctacacccttgaggccgtttacgaggccgtctttggaaagcccaaggagaaggtttacgcagaggagatagcgcaggcctgggagagcggggagggccttgaaagggttgcaagatactcgatggaggacgctaaggtgacctacgagctgggaagggagttcttcccgatggaggcccagctttcgaggattataggccagagcctctgggacgtctcgcgctcgagcaccggaaatttggtggagtggttcctcctgcggaaggcctacaagaggaacgagctcgccccaaacaagcccgacgagagggagctcgcgagacggcgcgggggctacgctggcgggtacgttaaggaaccagagcggggattgtgggacaacattgtgtatttagacttccgctcgctgtatccttcaatcatcataacccacaacgtctcgccggataccctcaaccgcgagggctgtaaagagtacgacgtcgcccctgaggttggacacaagttctgcaaggacttccccggcttcataccaagcctcctgggagatttgctcgaggagaggcagaagataaagcggaagatgaaggcaacggttgacccgctggagaagaaactcctcgattacaggcagaggacaatcaaaatcctcgccaacagcttctacggctactacggctacgccaaggcccggtggtactgcaaggagtgcgccgagagcgttacggcctggggaagggagtatatagaaatggttatccgggaactcgaagaaaaattcggttttaaagttctctatgccgatacagacggtctccatgctaccattcccggagcagacgctgaaacagtcaagaaaaaagcaaaggagttcttaaaatacattaatccaaaactgcccggcctgctcgaacttgagtacgagggcttctacgtgaggggcttcttcgtcacgaagaagaagtacgctgtgatagacgaggagggcaagataaccacgaggggtcttgagattgtgaggcgcgactggagcgagatagcgaaggagacccaggccagggtcttagaggcgatactcaagcacggtgacgtcgaggaggccgttaggatagtcaaggaagtgacggaaaagctgagcaagtatgaggtcccgcccgagaagctggtaatccacgagcagataacgcgcgatttgagggattacaaagccaccggcccgcacgttgccgttgcgaagaggctcgcggcgcgtggagtgaaaatccggcccggcacggtgataagctacatcgtcctaaagggctctggaaggataggcgacagggcgattccagctgatgagttcgacccgacgaagcaccgctacgatgcggaatactacatcgagaaccaggttctcccggcggtggagaggattctaaaagccttcggctatcggaaggaggatttgcgctaccagaagacgaagcaggtcggctcgggcgcgtggctgaaggtgaaggggaagaagggtaccgaagcttacgtagaacaaaaactcatctcagaagaggatctgaatagcgccgtcgaccatcatcatcatcatcattga

SEQ ID NO: 84 - protein, 802 aa, Artificial Sequence
  Description of Artificial Sequence:Thermococcus species 9degreesN-7 mutant DNA polymerase, 9degreesN mutant
MILDTDYITENGKPVIRVFKKENGEFKIEYDRTFEPYFYALLKDDSAIEDVKKVTAKRHGTVVKVKRAEKVQKKFLGRPIEVWKLYFNHPQDVPAIRDRIRAHPAVVDIYEYDIPFAKRYLIDKGLIPMEGDEELTMLAFAIATLYHEGEEFGTGPILMISYADGSEARVITWKKIDLPYVDVVSTEKEMIKRFLRVVREKDPDVLITYNGDNFDFAYLKKRCEELGIKFTLGRDGSEPKIQRMGDRFAVEVKGRIHFDLYPVIRRTINLPTYTLEAVYEAVFGKPKEKVYAEEIAQAWESGEGLERVARYSMEDAKVTYELGREFFPMEAQLSRIIGQSLWDVSRSSTGNLVEWFLLRKAYKRNELAPNKPDERELARRRGGYAGGYVKEPERGLWDNIVYLDFRSLYPSIIITHNVSPDTLNREGCKEYDVAPEVGHKFCKDFPGFIPSLLGDLLEERQKIKRKMKATVDPLEKKLLDYRQRTIKILANSFYGYYGYAKARWYCKECAESVTAWGREYIEMVIRELEEKFGFKVLYADTDGLHATIPGADAETVKKKAKEFLKYINPKLPGLLELEYEGFYVRGFFVTKKKYAVIDEEGKITTRGLEIVRRDWSEIAKETQARVLEAILKHGDVEEAVRIVKEVTEKLSKYEVPPEKLVIHEQITRDLRDYKATGPHVAVAKRLAARGVKIRPGTVISYIVLKGSGRIGDRAIPADEFDPTKHRYDAEYYIENQVLPAVERILKAFGYRKEDLRYQKTKQVGSGAWLKVKGKKGTEAYVEQKLISEEDLNSAVDHHHHHH

SEQ ID NO: 85 - DNA, 2409 bp, Artificial Sequence
  Description of Artificial Sequence:Thermococcus species 9degreesN-7 mutant DNA polymerase, 9degreesN mutant
atgattctcgataccgactacatcaccgagaacgggaagcccgtgataagggtcttcaagaaggagaacggcgagtttaaaatcgagtacgacagaaccttcgagccctacttctacgcccttctgaaggacgattctgcgatagaggacgtcaagaaggtaaccgcaaagaggcacggaacggttgtcaaggtgaagcgcgccgagaaggtgcagaagaagttcctcggcaggccgatagaggtctggaagctctacttcaaccatcctcaggacgtcccggcgattcgagacaggatacgcgcccaccccgctgtcgttgacatctacgagtacgacatacccttcgccaagcgctacctcatcgacaagggcctgattccgatggagggcgacgaggagcttacgatgctcgccttcgcgatcgcaaccctctatcacgagggcgaggagttcggaaccgggccgattctcatgataagctacgccgacgggagcgaggcgagggtgataacctggaagaagattgaccttccgtacgttgacgtcgtctcgaccgagaaggagatgattaagcgcttcctccgcgtcgtcagggagaaggaccccgacgtgctcatcacctacaacggcgacaacttcgacttcgcctacctgaagaagcgctgtgaggaactcggaataaagttcacactcggcagggacgggagcgagccgaagatacagcgaatgggcgaccgctttgccgttgaggtgaagggcaggattcacttcgacctctaccccgtcataaggcgcacgataaacctcccgacctacacccttgaggccgtttacgaggccgtctttggaaagcccaaggagaaggtttacgcagaggagatagcgcaggcctgggagagcggggagggccttgaaagggttgcaagatactcgatggaggacgctaaggtgacctacgagctgggaagggagttcttcccgatggaggccaaactttcgaggcttataggccagagcctctgggacgtctcgcgctcgagcaccggaaatttggtggagtggttcctcctgcggaaggcctacaagaggaacgagctcgccccaaacaagcccgacgagagggagctcgcgagacggcgcgggggctacgctggcgggtacgttaaggaaccagagcggggattgtgggacaacattgtgtatttagacttccgctcgctgtatccttcaatcatcataacccacaacgtctcgccggataccctcaaccgcgagggctgtaaagagtacgacgtcgcccctgaggttggacacaagttctgcaaggacttccccggcttcataccaagcctcctgggagatttgctcgaggagaggcagaagataaagcggaagatgaaggcaacggttgacccgctggagaagaaactcctcgattacaggcagaggttgatcaaaatcctcgccaacagcttctacggctactacggctacgccaaggcccggtggtactgcaaggagtgcgccgagagcgttacggcctggggaagggagtatatagaaatggttatccgggaactcgaagaaaaattcggttttaaagttctctatgccgatacagacggtctccatgctaccattcccggagcagacgctgaaacagtcaagaaaaaagcaaaggagttcttaaaatacattaatccaaaactgcccggcctgctcgaacttgagtacgagggcttctacgtgaggggcttcttcgtcacgaagaagaagtacgctgtgatagacgaggagggcaagataaccacgaggggtcttgagattgtgaggcgcgactggagcgagatagcgaaggagacccaggccagggtcttagaggcgatactcaagcacggtgacgtcgaggaggccgttaggatagtcaaggaagtgacggaaaagctgagcaagtatgaggtcccgcccgagaagctggtaatccacgagcagataacgcgcgatttgagggattacaaagccaccggcccgcacgttgccgttgcgaagaggctcgcggcgcgtggagtgaaaatccggcccggcacggtgataagctacatcgtcctaaagggctctggaaggataggcgacagggcgattccagctgatgagttcgacccgacgaagcaccgctacgatgcggaatactacatcgagaaccaggttctcccggcggtggagaggattctaaaagccttcggctatcggaaggaggatttgcgctaccagaagacgaagcaggtcggctcgggcgcgtggctgaaggtgaaggggaagaagggtaccgaagcttacgtagaacaaaaactcatctcagaagaggatctgaatagcgccgtcgaccatcatcatcatcatcattga

SEQ ID NO: 86 - protein, 802 aa, Artificial Sequence
  Description of Artificial Sequence:Thermococcus species 9degreesN-7 mutant DNA polymerase, 9degreesN mutant
MILDTDYITENGKPVIRVFKKENGEFKIEYDRTFEPYFYALLKDDSAIEDVKKVTAKRHGTVVKVKRAEKVQKKFLGRPIEVWKLYFNHPQDVPAIRDRIRAHPAVVDIYEYDIPFAKRYLIDKGLIPMEGDEELTMLAFAIATLYHEGEEFGTGPILMISYADGSEARVITWKKIDLPYVDVVSTEKEMIKRFLRVVREKDPDVLITYNGDNFDFAYLKKRCEELGIKFTLGRDGSEPKIQRMGDRFAVEVKGRIHFDLYPVIRRTINLPTYTLEAVYEAVFGKPKEKVYAEEIAQAWESGEGLERVARYSMEDAKVTYELGREFFPMEAKLSRLIGQSLWDVSRSSTGNLVEWFLLRKAYKRNELAPNKPDERELARRRGGYAGGYVKEPERGLWDNIVYLDFRSLYPSIIITHNVSPDTLNREGCKEYDVAPEVGHKFCKDFPGFIPSLLGDLLEERQKIKRKMKATVDPLEKKLLDYRQRLIKILANSFYGYYGYAKARWYCKECAESVTAWGREYIEMVIRELEEKFGFKVLYADTDGLHATIPGADAETVKKKAKEFLKYINPKLPGLLELEYEGFYVRGFFVTKKKYAVIDEEGKITTRGLEIVRRDWSEIAKETQARVLEAILKHGDVEEAVRIVKEVTEKLSKYEVPPEKLVIHEQITRDLRDYKATGPHVAVAKRLAARGVKIRPGTVISYIVLKGSGRIGDRAIPADEFDPTKHRYDAEYYIENQVLPAVERILKAFGYRKEDLRYQKTKQVGSGAWLKVKGKKGTEAYVEQKLISEEDLNSAVDHHHHHH

SEQ ID NO: 87 - DNA, 2409 bp, Artificial Sequence
  Description of Artificial Sequence:Thermococcus species 9degreesN-7 mutant DNA polymerase, 9degreesN mutant
atgattctcgataccgactacatcaccgagaacgggaagcccgtgataagggtcttcaagaaggagaacggcgagtttaaaatcgagtacgacagaaccttcgagccctacttctacgcccttctgaaggacgattctgcgatagaggacgtcaagaaggtaaccgcaaagaggcacggaacggttgtcaaggtgaagcgcgccgagaaggtgcagaagaagttcctcggcaggccgatagaggtctggaagctctacttcaaccatcctcaggacgtcccggcgattcgagacaggatacgcgcccaccccgctgtcgttgacatctacgagtacgacatacccttcgccaagcgctacctcatcgacaagggcctgattccgatggagggcgacgaggagcttacgatgctcgccttcgcgatcgcaaccctctatcacgagggcgaggagttcggaaccgggccgattctcatgataagctacgccgacgggagcgaggcgagggtgataacctggaagaagattgaccttccgtacgttgacgtcgtctcgaccgagaaggagatgattaagcgcttcctccgcgtcgtcagggagaaggaccccgacgtgctcatcacctacaacggcgacaacttcgacttcgcctacctgaagaagcgctgtgaggaactcggaataaagttcacactcggcagggacgggagcgagccgaagatacagcgaatgggcgaccgctttgccgttgaggtgaagggcaggattcacttcgacctctaccccgtcataaggcgcacgataaacctcccgacctacacccttgaggccgtttacgaggccgtctttggaaagcccaaggagaaggtttacgcagaggagatagcgcaggcctgggagagcggggagggccttgaaagggttgcaagatactcgatggaggacgctaaggtgacctacgagctgggaagggagttcttcccgatggaggcctcgctttcgaggcttataggccagagcctctgggacgtctcgcgctcgagcaccggaaatttggtggagtggttcctcctgcggaaggcctacaagaggaacgagctcgccccaaacaagcccgacgagagggagctcgcgagacggcgcgggggctacgctggcgggtacgttaaggaaccagagcggggattgtgggacaacattgtgtatttagacttccgctcgctgtatccttcaatcatcataacccacaacgtctcgccggataccctcaaccgcgagggctgtaaagagtacgacgtcgcccctgaggttggacacaagttctgcaaggacttccccggcttcataccaagcctcctgggagatttgctcgaggagaggcagaagataaagcggaagatgaaggcaacggttgacccgctggagaagaaactcctcgattacaggcagaggaggatcaaaatcctcgccaacagcttctacggctactacggctacgccaaggcccggtggtactgcaaggagtgcgccgagagcgttacggcctggggaagggagtatatagaaatggttatccgggaactcgaagaaaaattcggttttaaagttctctatgccgatacagacggtctccatgctaccattcccggagcagacgctgaaacagtcaagaaaaaagcaaaggagttcttaaaatacattaatccaaaactgcccggcctgctcgaacttgagtacgagggcttctacgtgaggggcttcttcgtcacgaagaagaagtacgctgtgatagacgaggagggcaagataaccacgaggggtcttgagattgtgaggcgcgactggagcgagatagcgaaggagacccaggccagggtcttagaggcgatactcaagcacggtgacgtcgaggaggccgttaggatagtcaaggaagtgacggaaaagctgagcaagtatgaggtcccgcccgagaagctggtaatccacgagcagataacgcgcgatttgagggattacaaagccaccggcccgcacgttgccgttgcgaagaggctcgcggcgcgtggagtgaaaatccggcccggcacggtgataagctacatcgtcctaaagggctctggaaggataggcgacagggcgattccagctgatgagttcgacccgacgaagcaccgctacgatgcggaatactacatcgagaaccaggttctcccggcggtggagaggattctaaaagccttcggctatcggaaggaggatttgcgctaccagaagacgaagcaggtcggctcgggcgcgtggctgaaggtgaaggggaagaagggtaccgaagcttacgtagaacaaaaactcatctcagaagaggatctgaatagcgccgtcgaccatcatcatcatcatcattga

SEQ ID NO: 88 - protein, 802 aa, Artificial Sequence
  Description of Artificial Sequence:Thermococcus species 9degreesN-7 mutant DNA polymerase, 9degreesN mutant
MILDTDYITENGKPVIRVFKKENGEFKIEYDRTFEPYFYALLKDDSAIEDVKKVTAKRHGTVVKVKRAEKVQKKFLGRPIEVWKLYFNHPQDVPAIRDRIRAHPAVVDIYEYDIPFAKRYLIDKGLIPMEGDEELTMLAFAIATLYHEGEEFGTGPILMISYADGSEARVITWKKIDLPYVDVVSTEKEMIKRFLRVVREKDPDVLITYNGDNFDFAYLKKRCEELGIKFTLGRDGSEPKIQRMGDRFAVEVKGRIHFDLYPVIRRTINLPTYTLEAVYEAVFGKPKEKVYAEEIAQAWESGEGLERVARYSMEDAKVTYELGREFFPMEASLSRLIGQSLWDVSRSSTGNLVEWFLLRKAYKRNELAPNKPDERELARRRGGYAGGYVKEPERGLWDNIVYLDFRSLYPSIIITHNVSPDTLNREGCKEYDVAPEVGHKFCKDFPGFIPSLLGDLLEERQKIKRKMKATVDPLEKKLLDYRQRRIKILANSFYGYYGYAKARWYCKECAESVTAWGREYIEMVIRELEEKFGFKVLYADTDGLHATIPGADAETVKKKAKEFLKYINPKLPGLLELEYEGFYVRGFFVTKKKYAVIDEEGKITTRGLEIVRRDWSEIAKETQARVLEAILKHGDVEEAVRIVKEVTEKLSKYEVPPEKLVIHEQITRDLRDYKATGPHVAVAKRLAARGVKIRPGTVISYIVLKGSGRIGDRAIPADEFDPTKHRYDAEYYIENQVLPAVERILKAFGYRKEDLRYQKTKQVGSGAWLKVKGKKGTEAYVEQKLISEEDLNSAVDHHHHHH

SEQ ID NO: 89 - DNA, 2409 bp, Artificial Sequence
  Description of Artificial Sequence:Thermococcus species 9degreesN-7 mutant DNA polymerase, 9degreesN mutant
atgattctcgataccgactacatcaccgagaacgggaagcccgtgataagggtcttcaagaaggagaacggcgagtttaaaatcgagtacgacagaaccttcgagccctacttctacgcccttctgaaggacgattctgcgatagaggacgtcaagaaggtaaccgcaaagaggcacggaacggttgtcaaggtgaagcgcgccgagaaggtgcagaagaagttcctcggcaggccgatagaggtctggaagctctacttcaaccatcctcaggacgtcccggcgattcgagacaggatacgcgcccaccccgctgtcgttgacatctacgagtacgacatacccttcgccaagcgctacctcatcgacaagggcctgattccgatggagggcgacgaggagcttacgatgctcgccttcgcgatcgcaaccctctatcacgagggcgaggagttcggaaccgggccgattctcatgataagctacgccgacgggagcgaggcgagggtgataacctggaagaagattgaccttccgtacgttgacgtcgtctcgaccgagaaggagatgattaagcgcttcctccgcgtcgtcagggagaaggaccccgacgtgctcatcacctacaacggcgacaacttcgacttcgcctacctgaagaagcgctgtgaggaactcggaataaagttcacactcggcagggacgggagcgagccgaagatacagcgaatgggcgaccgctttgccgttgaggtgaagggcaggattcacttcgacctctaccccgtcataaggcgcacgataaacctcccgacctacacccttgaggccgtttacgaggccgtctttggaaagcccaaggagaaggtttacgcagaggagatagcgcaggcctgggagagcggggagggccttgaaagggttgcaagatactcgatggaggacgctaaggtgacctacgagctgggaagggagttcttcccgatggaggcccaactttcgaggcttataggccagagcctctgggacgtctcgcgctcgagcaccggaaatttggtggagtggttcctcctgcggaaggcctacaagaggaacgagctcgccccaaacaagcccgacgagagggagctcgcgagacggcgcgggggctacgctggcgggtacgttaaggaaccagagcggggattgtgggacaacattgtgtatttagacttccgctcgctgtatccttcaatcatcataacccacaacgtctcgccggataccctcaaccgcgagggctgtaaagagtacgacgtcgcccctgaggttggacacaagttctgcaaggacttccccggcttcataccaagcctcctgggagatttgctcgaggagaggcagaagataaagcggaagatgaaggcaacggttgacccgctggagaagaaactcctcgattacaggcagaggcgaatcaaaatcctcgccaacagcttctacggctactacggctacgccaaggcccggtggtactgcaaggagtgcgccgagagcgttacggcctggggaagggagtatatagaaatggttatccgggaactcgaagaaaaattcggttttaaagttctctatgccgatacagacggtctccatgctaccattcccggagcagacgctgaaacagtcaagaaaaaagcaaaggagttcttaaaatacattaatccaaaactgcccggcctgctcgaacttgagtacgagggcttctacgtgaggggcttcttcgtcacgaagaagaagtacgctgtgatagacgaggagggcaagataaccacgaggggtcttgagattgtgaggcgcgactggagcgagatagcgaaggagacccaggccagggtcttagaggcgatactcaagcacggtgacgtcgaggaggccgttaggatagtcaaggaagtgacggaaaagctgagcaagtatgaggtcccgcccgagaagctggtaatccacgagcagataacgcgcgatttgagggattacaaagccaccggcccgcacgttgccgttgcgaagaggctcgcggcgcgtggagtgaaaatccggcccggcacggtgataagctacatcgtcctaaagggctctggaaggataggcgacagggcgattccagctgatgagttcgacccgacgaagcaccgctacgatgcggaatactacatcgagaaccaggttctcccggcggtggagaggattctaaaagccttcggctatcggaaggaggatttgcgctaccagaagacgaagcaggtcggctcgggcgcgtggctgaaggtgaaggggaagaagggtaccgaagcttacgtagaacaaaaactcatctcagaagaggatctgaatagcgccgtcgaccatcatcatcatcatcattga

SEQ ID NO: 90 - protein, 802 aa, Artificial Sequence; identical to SEQ ID NO: 6
  Description of Artificial Sequence:Thermococcus species 9degreesN-7 mutant DNA polymerase, 9degreesN mutant

SEQ ID NO: 91 - DNA, 2409 bp, Artificial Sequence
  Description of Artificial Sequence:Thermococcus species 9degreesN-7 mutant DNA polymerase, 9degreesN mutant
atgattctcgataccgactacatcaccgagaacgggaagcccgtgataagggtcttcaagaaggagaacggcgagtttaaaatcgagtacgacagaaccttcgagccctacttctacgcccttctgaaggacgattctgcgatagaggacgtcaagaaggtaaccgcaaagaggcacggaacggttgtcaaggtgaagcgcgccgagaaggtgcagaagaagttcctcggcaggccgatagaggtctggaagctctacttcaaccatcctcaggacgtcccggcgattcgagacaggatacgcgcccaccccgctgtcgttgacatctacgagtacgacatacccttcgccaagcgctacctcatcgacaagggcctgattccgatggagggcgacgaggagcttacgatgctcgccttcgcgatcgcaaccctctatcacgagggcgaggagttcggaaccgggccgattctcatgataagctacgccgacgggagcgaggcgagggtgataacctggaagaagattgaccttccgtacgttgacgtcgtctcgaccgagaaggagatgattaagcgcttcctccgcgtcgtcagggagaaggaccccgacgtgctcatcacctacaacggcgacaacttcgacttcgcctacctgaagaagcgctgtgaggaactcggaataaagttcacactcggcagggacgggagcgagccgaagatacagcgaatgggcgaccgctttgccgttgaggtgaagggcaggattcacttcgacctctaccccgtcataaggcgcacgataaacctcccgacctacacccttgaggccgtttacgaggccgtctttggaaagcccaaggagaaggtttacgcagaggagatagcgcaggcctgggagagcggggagggccttgaaagggttgcaagatactcgatggaggacgctaaggtgacctacgagctgggaagggagttcttcccgatggaggccacgctttcgaggcttataggccagagcctctgggacgtctcgcgctcgagcaccggaaatttggtggagtggttcctcctgcggaaggcctacaagaggaacgagctcgccccaaacaagcccgacgagagggagctcgcgagacggcgcgggggctacgctggcgggtacgttaaggaaccagagcggggattgtgggacaacattgtgtatttagacttccgctcgctgtatccttcaatcatcataacccacaacgtctcgccggataccctcaaccgcgagggctgtaaagagtacgacgtcgcccctgaggttggacacaagttctgcaaggacttccccggcttcataccaagcctcctgggagatttgctcgaggagaggcagaagataaagcggaagatgaaggcaacggttgacccgctggagaagaaactcctcgattacaggcagaggaaaatcaaaatcctcgccaacagcttctacggctactacggctacgccaaggcccggtggtactgcaaggagtgcgccgagagcgttacggcctggggaagggagtatatagaaatggttatccgggaactcgaagaaaaattcggttttaaagttctctatgccgatacagacggtctccatgctaccattcccggagcagacgctgaaacagtcaagaaaaaagcaaaggagttcttaaaatacattaatccaaaactgcccggcctgctcgaacttgagtacgagggcttctacgtgaggggcttcttcgtcacgaagaagaagtacgctgtgatagacgaggagggcaagataaccacgaggggtcttgagattgtgaggcgcgactggagcgagatagcgaaggagacccaggccagggtcttagaggcgatactcaagcacggtgacgtcgaggaggccgttaggatagtcaaggaagtgacggaaaagctgagcaagtatgaggtcccgcccgagaagctggtaatccacgagcagataacgcgcgatttgagggattacaaagccaccggcccgcacgttgccgttgcgaagaggctcgcggcgcgtggagtgaaaatccggcccggcacggtgataagctacatcgtcctaaagggctctggaaggataggcgacagggcgattccagctgatgagttcgacccgacgaagcaccgctacgatgcggaatactacatcgagaaccaggttctcccggcggtggagaggattctaaaagccttcggctatcggaaggaggatttgcgctaccagaagacgaagcaggtcggctcgggcgcgtggctgaaggtgaaggggaagaagggtaccgaagcttacgtagaacaaaaactcatctcagaagaggatctgaatagcgccgtcgaccatcatcatcatcatcattga

SEQ ID NO: 92 - protein, 802 aa, Artificial Sequence
  Description of Artificial Sequence:Thermococcus species 9degreesN-7 mutant DNA polymerase, 9degreesN mutant
MILDTDYITENGKPVIRVFKKENGEFKIEYDRTFEPYFYALLKDDSAIEDVKKVTAKRHGTVVKVKRAEKVQKKFLGRPIEVWKLYFNHPQDVPAIRDRIRAHPAVVDIYEYDIPFAKRYLIDKGLIPMEGDEELTMLAFAIATLYHEGEEFGTGPILMISYADGSEARVITWKKIDLPYVDVVSTEKEMIKRFLRVVREKDPDVLITYNGDNFDFAYLKKRCEELGIKFTLGRDGSEPKIQRMGDRFAVEVKGRIHFDLYPVIRRTINLPTYTLEAVYEAVFGKPKEKVYAEEIAQAWESGEGLERVARYSMEDAKVTYELGREFFPMEATLSRLIGQSLWDVSRSSTGNLVEWFLLRKAYKRNELAPNKPDERELARRRGGYAGGYVKEPERGLWDNIVYLDFRSLYPSIIITHNVSPDTLNREGCKEYDVAPEVGHKFCKDFPGFIPSLLGDLLEERQKIKRKMKATVDPLEKKLLDYRQRKIKILANSFYGYYGYAKARWYCKECAESVTAWGREYIEMVIRELEEKFGFKVLYADTDGLHATIPGADAETVKKKAKEFLKYINPKLPGLLELEYEGFYVRGFFVTKKKYAVIDEEGKITTRGLEIVRRDWSEIAKETQARVLEAILKHGDVEEAVRIVKEVTEKLSKYEVPPEKLVIHEQITRDLRDYKATGPHVAVAKRLAARGVKIRPGTVISYIVLKGSGRIGDRAIPADEFDPTKHRYDAEYYIENQVLPAVERILKAFGYRKEDLRYQKTKQVGSGAWLKVKGKKGTEAYVEQKLISEEDLNSAVDHHHHHH

SEQ ID NO: 93 - DNA, 2409 bp, Artificial Sequence
  Description of Artificial Sequence:Thermococcus species 9degreesN-7 mutant DNA polymerase, 9degreesN mutant
atgattctcgataccgactacatcaccgagaacgggaagcccgtgataagggtcttcaagaaggagaacggcgagtttaaaatcgagtacgacagaaccttcgagccctacttctacgcccttctgaaggacgattctgcgatagaggacgtcaagaaggtaaccgcaaagaggcacggaacggttgtcaaggtgaagcgcgccgagaaggtgcagaagaagttcctcggcaggccgatagaggtctggaagctctacttcaaccatcctcaggacgtcccggcgattcgagacaggatacgcgcccaccccgctgtcgttgacatctacgagtacgacatacccttcgccaagcgctacctcatcgacaagggcctgattccgatggagggcgacgaggagcttacgatgctcgccttcgcgatcgcaaccctctatcacgagggcgaggagttcggaaccgggccgattctcatgataagctacgccgacgggagcgaggcgagggtgataacctggaagaagattgaccttccgtacgttgacgtcgtctcgaccgagaaggagatgattaagcgcttcctccgcgtcgtcagggagaaggaccccgacgtgctcatcacctacaacggcgacaacttcgacttcgcctacctgaagaagcgctgtgaggaactcggaataaagttcacactcggcagggacgggagcgagccgaagatacagcgaatgggcgaccgctttgccgttgaggtgaagggcaggattcacttcgacctctaccccgtcataaggcgcacgataaacctcccgacctacacccttgaggccgtttacgaggccgtctttggaaagcccaaggagaaggtttacgcagaggagatagcgcaggcctgggagagcggggagggccttgaaagggttgcaagatactcgatggaggacgctaaggtgacctacgagctgggaagggagttcttcccgatggaggccaagctttcgaggcttataggccagagcctctgggacgtctcgcgctcgagcaccggaaatttggtggagtggttcctcctgcggaaggcctacaagaggaacgagctcgccccaaacaagcccgacgagagggagctcgcgagacggcgcgggggctacgctggcgggtacgttaaggaaccagagcggggattgtgggacaacattgtgtatttagacttccgctcgctgtatccttcaatcatcataacccacaacgtctcgccggataccctcaaccgcgagggctgtaaagagtacgacgtcgcccctgaggttggacacaagttctgcaaggacttccccggcttcataccaagcctcctgggagatttgctcgaggagaggcagaagataaagcggaagatgaaggcaacggttgacccgctggagaagaaactcctcgattacaggcagaggcaaatcaaaatcctcgccaacagcttctacggctactacggctacgccaaggcccggtggtactgcaaggagtgcgccgagagcgttacggcctggggaagggagtatatagaaatggttatccgggaactcgaagaaaaattcggttttaaagttctctatgccgatacagacggtctccatgctaccattcccggagcagacgctgaaacagtcaagaaaaaagcaaaggagttcttaaaatacattaatccaaaactgcccggcctgctcgaacttgagtacgagggcttctacgtgaggggcttcttcgtcacgaagaagaagtacgctgtgatagacgaggagggcaagataaccacgaggggtcttgagattgtgaggcgcgactggagcgagatagcgaaggagacccaggccagggtcttagaggcgatactcaagcacggtgacgtcgaggaggccgttaggatagtcaaggaagtgacggaaaagctgagcaagtatgaggtcccgcccgagaagctggtaatccacgagcagataacgcgcgatttgagggattacaaagccaccggcccgcacgttgccgttgcgaagaggctcgcggcgcgtggagtgaaaatccggcccggcacggtgataagctacatcgtcctaaagggctctggaaggataggcgacagggcgattccagctgatgagttcgacccgacgaagcaccgctacgatgcggaatactacatcgagaaccaggttctcccggcggtggagaggattctaaaagccttcggctatcggaaggaggatttgcgctaccagaagacgaagcaggtcggctcgggcgcgtggctgaaggtgaaggggaagaagggtaccgaagcttacgtagaacaaaaactcatctcagaagaggatctgaatagcgccgtcgaccatcatcatcatcatcattga

SEQ ID NO: 94 - protein, 802 aa, Artificial Sequence
  Description of Artificial Sequence:Thermococcus species 9degreesN-7 mutant DNA polymerase, 9degreesN mutant
MILDTDYITENGKPVIRVFKKENGEFKIEYDRTFEPYFYALLKDDSAIEDVKKVTAKRHGTVVKVKRAEKVQKKFLGRPIEVWKLYFNHPQDVPAIRDRIRAHPAVVDIYEYDIPFAKRYLIDKGLIPMEGDEELTMLAFAIATLYHEGEEFGTGPILMISYADGSEARVITWKKIDLPYVDVVSTEKEMIKRFLRVVREKDPDVLITYNGDNFDFAYLKKRCEELGIKFTLGRDGSEPKIQRMGDRFAVEVKGRIHFDLYPVIRRTINLPTYTLEAVYEAVFGKPKEKVYAEEIAQAWESGEGLERVARYSMEDAKVTYELGREFFPMEAKLSRLIGQSLWDVSRSSTGNLVEWFLLRKAYKRNELAPNKPDERELARRRGGYAGGYVKEPERGLWDNIVYLDFRSLYPSIIITHNVSPDTLNREGCKEYDVAPEVGHKFCKDFPGFIPSLLGDLLEERQKIKRKMKATVDPLEKKLLDYRQRQIKILANSFYGYYGYAKARWYCKECAESVTAWGREYIEMVIRELEEKFGFKVLYADTDGLHATIPGADAETVKKKAKEFLKYINPKLPGLLELEYEGFYVRGFFVTKKKYAVIDEEGKITTRGLEIVRRDWSEIAKETQARVLEAILKHGDVEEAVRIVKEVTEKLSKYEVPPEKLVIHEQITRDLRDYKATGPHVAVAKRLAARGVKIRPGTVISYIVLKGSGRIGDRAIPADEFDPTKHRYDAEYYIENQVLPAVERILKAFGYRKEDLRYQKTKQVGSGAWLKVKGKKGTEAYVEQKLISEEDLNSAVDHHHHHH

SEQ ID NO: 95 - DNA, 2409 bp, Artificial Sequence
  Description of Artificial Sequence:Thermococcus species 9degreesN-7 mutant DNA polymerase, 9degreesN mutant
atgattctcgataccgactacatcaccgagaacgggaagcccgtgataagggtcttcaagaaggagaacggcgagtttaaaatcgagtacgacagaaccttcgagccctacttctacgcccttctgaaggacgattctgcgatagaggacgtcaagaaggtaaccgcaaagaggcacggaacggttgtcaaggtgaagcgcgccgagaaggtgcagaagaagttcctcggcaggccgatagaggtctggaagctctacttcaaccatcctcaggacgtcccggcgattcgagacaggatacgcgcccaccccgctgtcgttgacatctacgagtacgacatacccttcgccaagcgctacctcatcgacaagggcctgattccgatggagggcgacgaggagcttacgatgctcgccttcgcgatcgcaaccctctatcacgagggcgaggagttcggaaccgggccgattctcatgataagctacgccgacgggagcgaggcgagggtgataacctggaagaagattgaccttccgtacgttgacgtcgtctcgaccgagaaggagatgattaagcgcttcctccgcgtcgtcagggagaaggaccccgacgtgctcatcacctacaacggcgacaacttcgacttcgcctacctgaagaagcgctgtgaggaactcggaataaagttcacactcggcagggacgggagcgagccgaagatacagcgaatgggcgaccgctttgccgttgaggtgaagggcaggattcacttcgacctctaccccgtcataaggcgcacgataaacctcccgacctacacccttgaggccgtttacgaggccgtctttggaaagcccaaggagaaggtttacgcagaggagatagcgcaggcctgggagagcggggagggccttgaaagggttgcaagatactcgatggaggacgctaaggtgacctacgagctgggaagggagttcttcccgatggaggcctacctttcgaggcttataggccagagcctctgggacgtctcgcgctcgagcaccggaaatttggtggagtggttcctcctgcggaaggcctacaagaggaacgagctcgccccaaacaagcccgacgagagggagctcgcgagacggcgcgggggctacgctggcgggtacgttaaggaaccagagcggggattgtgggacaacattgtgtatttagacttccgctcgctgtatccttcaatcatcataacccacaacgtctcgccggataccctcaaccgcgagggctgtaaagagtacgacgtcgcccctgaggttggacacaagttctgcaaggacttccccggcttcataccaagcctcctgggagatttgctcgaggagaggcagaagataaagcggaagatgaaggcaacggttgacccgctggagaagaaactcctcgattacaggcagaggtttatcaaaatcctcgccaacagcttctacggctactacggctacgccaaggcccggtggtactgcaaggagtgcgccgagagcgttacggcctggggaagggagtatatagaaatggttatccgggaactcgaagaaaaattcggttttaaagttctctatgccgatacagacggtctccatgctaccattcccggagcagacgctgaaacagtcaagaaaaaagcaaaggagttcttaaaatacattaatccaaaactgcccggcctgctcgaacttgagtacgagggcttctacgtgaggggcttcttcgtcacgaagaagaagtacgctgtgatagacgaggagggcaagataaccacgaggggtcttgagattgtgaggcgcgactggagcgagatagcgaaggagacccaggccagggtcttagaggcgatactcaagcacggtgacgtcgaggaggccgttaggatagtcaaggaagtgacggaaaagctgagcaagtatgaggtcccgcccgagaagctggtaatccacgagcagataacgcgcgatttgagggattacaaagccaccggcccgcacgttgccgttgcgaagaggctcgcggcgcgtggagtgaaaatccggcccggcacggtgataagctacatcgtcctaaagggctctggaaggataggcgacagggcgattccagctgatgagttcgacccgacgaagcaccgctacgatgcggaatactacatcgagaaccaggttctcccggcggtggagaggattctaaaagccttcggctatcggaaggaggatttgcgctaccagaagacgaagcaggtcggctcgggcgcgtggctgaaggtgaaggggaagaagggtaccgaagcttacgtagaacaaaaactcatctcagaagaggatctgaatagcgccgtcgaccatcatcatcatcatcattga

SEQ ID NO: 96 - protein, 802 aa, Artificial Sequence
  Description of Artificial Sequence:Thermococcus species 9degreesN-7 mutant DNA polymerase, 9degreesN mutant
MILDTDYITENGKPVIRVFKKENGEFKIEYDRTFEPYFYALLKDDSAIEDVKKVTAKRHGTVVKVKRAEKVQKKFLGRPIEVWKLYFNHPQDVPAIRDRIRAHPAVVDIYEYDIPFAKRYLIDKGLIPMEGDEELTMLAFAIATLYHEGEEFGTGPILMISYADGSEARVITWKKIDLPYVDVVSTEKEMIKRFLRVVREKDPDVLITYNGDNFDFAYLKKRCEELGIKFTLGRDGSEPKIQRMGDRFAVEVKGRIHFDLYPVIRRTINLPTYTLEAVYEAVFGKPKEKVYAEEIAQAWESGEGLERVARYSMEDAKVTYELGREFFPMEAYLSRLIGQSLWDVSRSSTGNLVEWFLLRKAYKRNELAPNKPDERELARRRGGYAGGYVKEPERGLWDNIVYLDFRSLYPSIIITHNVSPDTLNREGCKEYDVAPEVGHKFCKDFPGFIPSLLGDLLEERQKIKRKMKATVDPLEKKLLDYRQRFIKILANSFYGYYGYAKARWYCKECAESVTAWGREYIEMVIRELEEKFGFKVLYADTDGLHATIPGADAETVKKKAKEFLKYINPKLPGLLELEYEGFYVRGFFVTKKKYAVIDEEGKITTRGLEIVRRDWSEIAKETQARVLEAILKHGDVEEAVRIVKEVTEKLSKYEVPPEKLVIHEQITRDLRDYKATGPHVAVAKRLAARGVKIRPGTVISYIVLKGSGRIGDRAIPADEFDPTKHRYDAEYYIENQVLPAVERILKAFGYRKEDLRYQKTKQVGSGAWLKVKGKKGTEAYVEQKLISEEDLNSAVDHHHHHH

SEQ ID NO: 97 - DNA, 2409 bp, Artificial Sequence
  Description of Artificial Sequence:Thermococcus species 9degreesN-7 mutant DNA polymerase, 9degreesN mutant
atgattctcgataccgactacatcaccgagaacgggaagcccgtgataagggtcttcaagaaggagaacggcgagtttaaaatcgagtacgacagaaccttcgagccctacttctacgcccttctgaaggacgattctgcgatagaggacgtcaagaaggtaaccgcaaagaggcacggaacggttgtcaaggtgaagcgcgccgagaaggtgcagaagaagttcctcggcaggccgatagaggtctggaagctctacttcaaccatcctcaggacgtcccggcgattcgagacaggatacgcgcccaccccgctgtcgttgacatctacgagtacgacatacccttcgccaagcgctacctcatcgacaagggcctgattccgatggagggcgacgaggagcttacgatgctcgccttcgcgatcgcaaccctctatcacgagggcgaggagttcggaaccgggccgattctcatgataagctacgccgacgggagcgaggcgagggtgataacctggaagaagattgaccttccgtacgttgacgtcgtctcgaccgagaaggagatgattaagcgcttcctccgcgtcgtcagggagaaggaccccgacgtgctcatcacctacaacggcgacaacttcgacttcgcctacctgaagaagcgctgtgaggaactcggaataaagttcacactcggcagggacgggagcgagccgaagatacagcgaatgggcgaccgctttgccgttgaggtgaagggcaggattcacttcgacctctaccccgtcataaggcgcacgataaacctcccgacctacacccttgaggccgtttacgaggccgtctttggaaagcccaaggagaaggtttacgcagaggagatagcgcaggcctgggagagcggggagggccttgaaagggttgcaagatactcgatggaggacgctaaggtgacctacgagctgggaagggagttcttcccgatggaggccgcgctttcgaggcttataggccagagcctctgggacgtctcgcgctcgagcaccggaaatttggtggagtggttcctcctgcggaaggcctacaagaggaacgagctcgccccaaacaagcccgacgagagggagctcgcgagacggcgcgggggctacgctggcgggtacgttaaggaaccagagcggggattgtgggacaacattgtgtatttagacttccgctcgctgtatccttcaatcatcataacccacaacgtctcgccggataccctcaaccgcgagggctgtaaagagtacgacgtcgcccctgaggttggacacaagttctgcaaggacttccccggcttcataccaagcctcctgggagatttgctcgaggagaggcagaagataaagcggaagatgaaggcaacggttgacccgctggagaagaaactcctcgattacaggcagaggaggatcaaaatcctcgccaacagcttctacggctactacggctacgccaaggcccggtggtactgcaaggagtgcgccgagagcgttacggcctggggaagggagtatatagaaatggttatccgggaactcgaagaaaaattcggttttaaagttctctatgccgatacagacggtctccatgctaccattcccggagcagacgctgaaacagtcaagaaaaaagcaaaggagttcttaaaatacattaatccaaaactgcccggcctgctcgaacttgagtacgagggcttctacgtgaggggcttcttcgtcacgaagaagaagtacgctgtgatagacgaggagggcaagataaccacgaggggtcttgagattgtgaggcgcgactggagcgagatagcgaaggagacccaggccagggtcttagaggcgatactcaagcacggtgacgtcgaggaggccgttaggatagtcaaggaagtgacggaaaagctgagcaagtatgaggtcccgcccgagaagctggtaatccacgagcagataacgcgcgatttgagggattacaaagccaccggcccgcacgttgccgttgcgaagaggctcgcggcgcgtggagtgaaaatccggcccggcacggtgataagctacatcgtcctaaagggctctggaaggataggcgacagggcgattccagctgatgagttcgacccgacgaagcaccgctacgatgcggaatactacatcgagaaccaggttctcccggcggtggagaggattctaaaagccttcggctatcggaaggaggatttgcgctaccagaagacgaagcaggtcggctcgggcgcgtggctgaaggtgaaggggaagaagggtaccgaagcttacgtagaacaaaaactcatctcagaagaggatctgaatagcgccgtcgaccatcatcatcatcatcattga

SEQ ID NO: 98 - protein, 802 aa, Artificial Sequence
  Description of Artificial Sequence:Thermococcus species 9degreesN-7 mutant DNA polymerase, 9degreesN mutant
MILDTDYITENGKPVIRVFKKENGEFKIEYDRTFEPYFYALLKDDSAIEDVKKVTAKRHGTVVKVKRAEKVQKKFLGRPIEVWKLYFNHPQDVPAIRDRIRAHPAVVDIYEYDIPFAKRYLIDKGLIPMEGDEELTMLAFAIATLYHEGEEFGTGPILMISYADGSEARVITWKKIDLPYVDVVSTEKEMIKRFLRVVREKDPDVLITYNGDNFDFAYLKKRCEELGIKFTLGRDGSEPKIQRMGDRFAVEVKGRIHFDLYPVIRRTINLPTYTLEAVYEAVFGKPKEKVYAEEIAQAWESGEGLERVARYSMEDAKVTYELGREFFPMEAALSRLIGQSLWDVSRSSTGNLVEWFLLRKAYKRNELAPNKPDERELARRRGGYAGGYVKEPERGLWDNIVYLDFRSLYPSIIITHNVSPDTLNREGCKEYDVAPEVGHKFCKDFPGFIPSLLGDLLEERQKIKRKMKATVDPLEKKLLDYRQRRIKILANSFYGYYGYAKARWYCKECAESVTAWGREYIEMVIRELEEKFGFKVLYADTDGLHATIPGADAETVKKKAKEFLKYINPKLPGLLELEYEGFYVRGFFVTKKKYAVIDEEGKITTRGLEIVRRDWSEIAKETQARVLEAILKHGDVEEAVRIVKEVTEKLSKYEVPPEKLVIHEQITRDLRDYKATGPHVAVAKRLAARGVKIRPGTVISYIVLKGSGRIGDRAIPADEFDPTKHRYDAEYYIENQVLPAVERILKAFGYRKEDLRYQKTKQVGSGAWLKVKGKKGTEAYVEQKLISEEDLNSAVDHHHHHH

SEQ ID NO: 99 - DNA, 2409 bp, Artificial Sequence
  Description of Artificial Sequence:Thermococcus species 9degreesN-7 mutant DNA polymerase, 9degreesN mutant
atgattctcgataccgactacatcaccgagaacgggaagcccgtgataagggtcttcaagaaggagaacggcgagtttaaaatcgagtacgacagaaccttcgagccctacttctacgcccttctgaaggacgattctgcgatagaggacgtcaagaaggtaaccgcaaagaggcacggaacggttgtcaaggtgaagcgcgccgagaaggtgcagaagaagttcctcggcaggccgatagaggtctggaagctctacttcaaccatcctcaggacgtcccggcgattcgagacaggatacgcgcccaccccgctgtcgttgacatctacgagtacgacatacccttcgccaagcgctacctcatcgacaagggcctgattccgatggagggcgacgaggagcttacgatgctcgccttcgcgatcgcaaccctctatcacgagggcgaggagttcggaaccgggccgattctcatgataagctacgccgacgggagcgaggcgagggtgataacctggaagaagattgaccttccgtacgttgacgtcgtctcgaccgagaaggagatgattaagcgcttcctccgcgtcgtcagggagaaggaccccgacgtgctcatcacctacaacggcgacaacttcgacttcgcctacctgaagaagcgctgtgaggaactcggaataaagttcacactcggcagggacgggagcgagccgaagatacagcgaatgggcgaccgctttgccgttgaggtgaagggcaggattcacttcgacctctaccccgtcataaggcgcacgataaacctcccgacctacacccttgaggccgtttacgaggccgtctttggaaagcccaaggagaaggtttacgcagaggagatagcgcaggcctgggagagcggggagggccttgaaagggttgcaagatactcgatggaggacgctaaggtgacctacgagctgggaagggagttcttcccgatggaggccgggctttcgaggcttataggccagagcctctgggacgtctcgcgctcgagcaccggaaatttggtggagtggttcctcctgcggaaggcctacaagaggaacgagctcgccccaaacaagcccgacgagagggagctcgcgagacggcgcgggggctacgctggcgggtacgttaaggaaccagagcggggattgtgggacaacattgtgtatttagacttccgctcgctgtatccttcaatcatcataacccacaacgtctcgccggataccctcaaccgcgagggctgtaaagagtacgacgtcgcccctgaggttggacacaagttctgcaaggacttccccggcttcataccaagcctcctgggagatttgctcgaggagaggcagaagataaagcggaagatgaaggcaacggttgacccgctggagaagaaactcctcgattacaggcagaggcgaatcaaaatcctcgccaacagcttctacggctactacggctacgccaaggcccggtggtactgcaaggagtgcgccgagagcgttacggcctggggaagggagtatatagaaatggttatccgggaactcgaagaaaaattcggttttaaagttctctatgccgatacagacggtctccatgctaccattcccggagcagacgctgaaacagtcaagaaaaaagcaaaggagttcttaaaatacattaatccaaaactgcccggcctgctcgaacttgagtacgagggcttctacgtgaggggcttcttcgtcacgaagaagaagtacgctgtgatagacgaggagggcaagataaccacgaggggtcttgagattgtgaggcgcgactggagcgagatagcgaaggagacccaggccagggtcttagaggcgatactcaagcacggtgacgtcgaggaggccgttaggatagtcaaggaagtgacggaaaagctgagcaagtatgaggtcccgcccgagaagctggtaatccacgagcagataacgcgcgatttgagggattacaaagccaccggcccgcacgttgccgttgcgaagaggctcgcggcgcgtggagtgaaaatccggcccggcacggtgataagctacatcgtcctaaagggctctggaaggataggcgacagggcgattccagctgatgagttcgacccgacgaagcaccgctacgatgcggaatactacatcgagaaccaggttctcccggcggtggagaggattctaaaagccttcggctatcggaaggaggatttgcgctaccagaagacgaagcaggtcggctcgggcgcgtggctgaaggtgaaggggaagaagggtaccgaagcttacgtagaacaaaaactcatctcagaagaggatctgaatagcgccgtcgaccatcatcatcatcatcattga

SEQ ID NO: 100 - protein, 802 aa, Artificial Sequence
  Description of Artificial Sequence:Thermococcus species 9degreesN-7 mutant DNA polymerase, 9degreesN mutant
MILDTDYITENGKPVIRVFKKENGEFKIEYDRTFEPYFYALLKDDSAIEDVKKVTAKRHGTVVKVKRAEKVQKKFLGRPIEVWKLYFNHPQDVPAIRDRIRAHPAVVDIYEYDIPFAKRYLIDKGLIPMEGDEELTMLAFAIATLYHEGEEFGTGPILMISYADGSEARVITWKKIDLPYVDVVSTEKEMIKRFLRVVREKDPDVLITYNGDNFDFAYLKKRCEELGIKFTLGRDGSEPKIQRMGDRFAVEVKGRIHFDLYPVIRRTINLPTYTLEAVYEAVFGKPKEKVYAEEIAQAWESGEGLERVARYSMEDAKVTYELGREFFPMEAGLSRLIGQSLWDVSRSSTGNLVEWFLLRKAYKRNELAPNKPDERELARRRGGYAGGYVKEPERGLWDNIVYLDFRSLYPSIIITHNVSPDTLNREGCKEYDVAPEVGHKFCKDFPGFIPSLLGDLLEERQKIKRKMKATVDPLEKKLLDYRQRRIKILANSFYGYYGYAKARWYCKECAESVTAWGREYIEMVIRELEEKFGFKVLYADTDGLHATIPGADAETVKKKAKEFLKYINPKLPGLLELEYEGFYVRGFFVTKKKYAVIDEEGKITTRGLEIVRRDWSEIAKETQARVLEAILKHGDVEEAVRIVKEVTEKLSKYEVPPEKLVIHEQITRDLRDYKATGPHVAVAKRLAARGVKIRPGTVISYIVLKGSGRIGDRAIPADEFDPTKHRYDAEYYIENQVLPAVERILKAFGYRKEDLRYQKTKQVGSGAWLKVKGKKGTEAYVEQKLISEEDLNSAVDHHHHHH

SEQ ID NO: 101 - DNA, 2409 bp, Artificial Sequence
  Description of Artificial Sequence:Thermococcus species 9degreesN-7 mutant DNA polymerase, 9degreesN mutant
atgattctcgataccgactacatcaccgagaacgggaagcccgtgataagggtcttcaagaaggagaacggcgagtttaaaatcgagtacgacagaaccttcgagccctacttctacgcccttctgaaggacgattctgcgatagaggacgtcaagaaggtaaccgcaaagaggcacggaacggttgtcaaggtgaagcgcgccgagaaggtgcagaagaagttcctcggcaggccgatagaggtctggaagctctacttcaaccatcctcaggacgtcccggcgattcgagacaggatacgcgcccaccccgctgtcgttgacatctacgagtacgacatacccttcgccaagcgctacctcatcgacaagggcctgattccgatggagggcgacgaggagcttacgatgctcgccttcgcgatcgcaaccctctatcacgagggcgaggagttcggaaccgggccgattctcatgataagctacgccgacgggagcgaggcgagggtgataacctggaagaagattgaccttccgtacgttgacgtcgtctcgaccgagaaggagatgattaagcgcttcctccgcgtcgtcagggagaaggaccccgacgtgctcatcacctacaacggcgacaacttcgacttcgcctacctgaagaagcgctgtgaggaactcggaataaagttcacactcggcagggacgggagcgagccgaagatacagcgaatgggcgaccgctttgccgttgaggtgaagggcaggattcacttcgacctctaccccgtcataaggcgcacgataaacctcccgacctacacccttgaggccgtttacgaggccgtctttggaaagcccaaggagaaggtttacgcagaggagatagcgcaggcctgggagagcggggagggccttgaaagggttgcaagatactcgatggaggacgctaaggtgacctacgagctgggaagggagttcttcccgatggaggccgacctttcgaggcttataggccagagcctctgggacgtctcgcgctcgagcaccggaaatttggtggagtggttcctcctgcggaaggcctacaagaggaacgagctcgccccaaacaagcccgacgagagggagctcgcgagacggcgcgggggctacgctggcgggtacgttaaggaaccagagcggggattgtgggacaacattgtgtatttagacttccgctcgctgtatccttcaatcatcataacccacaacgtctcgccggataccctcaaccgcgagggctgtaaagagtacgacgtcgcccctgaggttggacacaagttctgcaaggacttccccggcttcataccaagcctcctgggagatttgctcgaggagaggcagaagataaagcggaagatgaaggcaacggttgacccgctggagaagaaactcctcgattacaggcagaggcgtatcaaaatcctcgccaacagcttctacggctactacggctacgccaaggcccggtggtactgcaaggagtgcgccgagagcgttacggcctggggaagggagtatatagaaatggttatccgggaactcgaagaaaaattcggttttaaagttctctatgccgatacagacggtctccatgctaccattcccggagcagacgctgaaacagtcaagaaaaaagcaaaggagttcttaaaatacattaatccaaaactgcccggcctgctcgaacttgagtacgagggcttctacgtgaggggcttcttcgtcacgaagaagaagtacgctgtgatagacgaggagggcaagataaccacgaggggtcttgagattgtgaggcgcgactggagcgagatagcgaaggagacccaggccagggtcttagaggcgatactcaagcacggtgacgtcgaggaggccgttaggatagtcaaggaagtgacggaaaagctgagcaagtatgaggtcccgcccgagaagctggtaatccacgagcagataacgcgcgatttgagggattacaaagccaccggcccgcacgttgccgttgcgaagaggctcgcggcgcgtggagtgaaaatccggcccggcacggtgataagctacatcgtcctaaagggctctggaaggataggcgacagggcgattccagctgatgagttcgacccgacgaagcaccgctacgatgcggaatactacatcgagaaccaggttctcccggcggtggagaggattctaaaagccttcggctatcggaaggaggatttgcgctaccagaagacgaagcaggtcggctcgggcgcgtggctgaaggtgaaggggaagaagggtaccgaagcttacgtagaacaaaaactcatctcagaagaggatctgaatagcgccgtcgaccatcatcatcatcatcattga

SEQ ID NO: 102 - protein, 802 aa, Artificial Sequence
  Description of Artificial Sequence:Thermococcus species 9degreesN-7 mutant DNA polymerase, 9degreesN mutant
MILDTDYITENGKPVIRVFKKENGEFKIEYDRTFEPYFYALLKDDSAIEDVKKVTAKRHGTVVKVKRAEKVQKKFLGRPIEVWKLYFNHPQDVPAIRDRIRAHPAVVDIYEYDIPFAKRYLIDKGLIPMEGDEELTMLAFAIATLYHEGEEFGTGPILMISYADGSEARVITWKKIDLPYVDVVSTEKEMIKRFLRVVREKDPDVLITYNGDNFDFAYLKKRCEELGIKFTLGRDGSEPKIQRMGDRFAVEVKGRIHFDLYPVIRRTINLPTYTLEAVYEAVFGKPKEKVYAEEIAQAWESGEGLERVARYSMEDAKVTYELGREFFPMEADLSRLIGQSLWDVSRSSTGNLVEWFLLRKAYKRNELAPNKPDERELARRRGGYAGGYVKEPERGLWDNIVYLDFRSLYPSIIITHNVSPDTLNREGCKEYDVAPEVGHKFCKDFPGFIPSLLGDLLEERQKIKRKMKATVDPLEKKLLDYRQRRIKILANSFYGYYGYAKARWYCKECAESVTAWGREYIEMVIRELEEKFGFKVLYADTDGLHATIPGADAETVKKKAKEFLKYINPKLPGLLELEYEGFYVRGFFVTKKKYAVIDEEGKITTRGLEIVRRDWSEIAKETQARVLEAILKHGDVEEAVRIVKEVTEKLSKYEVPPEKLVIHEQITRDLRDYKATGPHVAVAKRLAARGVKIRPGTVISYIVLKGSGRIGDRAIPADEFDPTKHRYDAEYYIENQVLPAVERILKAFGYRKEDLRYQKTKQVGSGAWLKVKGKKGTEAYVEQKLISEEDLNSAVDHHHHHH

SEQ ID NO: 103 - DNA, 2409 bp, Artificial Sequence
  Description of Artificial Sequence:Thermococcus species 9degreesN-7 mutant DNA polymerase, 9degreesN mutant
atgattctcgataccgactacatcaccgagaacgggaagcccgtgataagggtcttcaagaaggagaacggcgagtttaaaatcgagtacgacagaaccttcgagccctacttctacgcccttctgaaggacgattctgcgatagaggacgtcaagaaggtaaccgcaaagaggcacggaacggttgtcaaggtgaagcgcgccgagaaggtgcagaagaagttcctcggcaggccgatagaggtctggaagctctacttcaaccatcctcaggacgtcccggcgattcgagacaggatacgcgcccaccccgctgtcgttgacatctacgagtacgacatacccttcgccaagcgctacctcatcgacaagggcctgattccgatggagggcgacgaggagcttacgatgctcgccttcgcgatcgcaaccctctatcacgagggcgaggagttcggaaccgggccgattctcatgataagctacgccgacgggagcgaggcgagggtgataacctggaagaagattgaccttccgtacgttgacgtcgtctcgaccgagaaggagatgattaagcgcttcctccgcgtcgtcagggagaaggaccccgacgtgctcatcacctacaacggcgacaacttcgacttcgcctacctgaagaagcgctgtgaggaactcggaataaagttcacactcggcagggacgggagcgagccgaagatacagcgaatgggcgaccgctttgccgttgaggtgaagggcaggattcacttcgacctctaccccgtcataaggcgcacgataaacctcccgacctacacccttgaggccgtttacgaggccgtctttggaaagcccaaggagaaggtttacgcagaggagatagcgcaggcctgggagagcggggagggccttgaaagggttgcaagatactcgatggaggacgctaaggtgacctacgagctgggaagggagttcttcccgatggaggcccgtctttcgaggcttataggccagagcctctgggacgtctcgcgctcgagcaccggaaatttggtggagtggttcctcctgcggaaggcctacaagaggaacgagctcgccccaaacaagcccgacgagagggagctcgcgagacggcgcgggggctacgctggcgggtacgttaaggaaccagagcggggattgtgggacaacattgtgtatttagacttccgctcgctgtatccttcaatcatcataacccacaacgtctcgccggataccctcaaccgcgagggctgtaaagagtacgacgtcgcccctgaggttggacacaagttctgcaaggacttccccggcttcataccaagcctcctgggagatttgctcgaggagaggcagaagataaagcggaagatgaaggcaacggttgacccgctggagaagaaactcctcgattacaggcagaggcttatcaaaatcctcgccaacagcttctacggctactacggctacgccaaggcccggtggtactgcaaggagtgcgccgagagcgttacggcctggggaagggagtatatagaaatggttatccgggaactcgaagaaaaattcggttttaaagttctctatgccgatacagacggtctccatgctaccattcccggagcagacgctgaaacagtcaagaaaaaagcaaaggagttcttaaaatacattaatccaaaactgcccggcctgctcgaacttgagtacgagggcttctacgtgaggggcttcttcgtcacgaagaagaagtacgctgtgatagacgaggagggcaagataaccacgaggggtcttgagattgtgaggcgcgactggagcgagatagcgaaggagacccaggccagggtcttagaggcgatactcaagcacggtgacgtcgaggaggccgttaggatagtcaaggaagtgacggaaaagctgagcaagtatgaggtcccgcccgagaagctggtaatccacgagcagataacgcgcgatttgagggattacaaagccaccggcccgcacgttgccgttgcgaagaggctcgcggcgcgtggagtgaaaatccggcccggcacggtgataagctacatcgtcctaaagggctctggaaggataggcgacagggcgattccagctgatgagttcgacccgacgaagcaccgctacgatgcggaatactacatcgagaaccaggttctcccggcggtggagaggattctaaaagccttcggctatcggaaggaggatttgcgctaccagaagacgaagcaggtcggctcgggcgcgtggctgaaggtgaaggggaagaagggtaccgaagcttacgtagaacaaaaactcatctcagaagaggatctgaatagcgccgtcgaccatcatcatcatcatcattga

SEQ ID NO: 104 - protein, 802 aa, Artificial Sequence
  Description of Artificial Sequence:Thermococcus species 9degreesN-7 mutant DNA polymerase, 9degreesN mutant
MILDTDYITENGKPVIRVFKKENGEFKIEYDRTFEPYFYALLKDDSAIEDVKKVTAKRHGTVVKVKRAEKVQKKFLGRPIEVWKLYFNHPQDVPAIRDRIRAHPAVVDIYEYDIPFAKRYLIDKGLIPMEGDEELTMLAFAIATLYHEGEEFGTGPILMISYADGSEARVITWKKIDLPYVDVVSTEKEMIKRFLRVVREKDPDVLITYNGDNFDFAYLKKRCEELGIKFTLGRDGSEPKIQRMGDRFAVEVKGRIHFDLYPVIRRTINLPTYTLEAVYEAVFGKPKEKVYAEEIAQAWESGEGLERVARYSMEDAKVTYELGREFFPMEARLSRLIGQSLWDVSRSSTGNLVEWFLLRKAYKRNELAPNKPDERELARRRGGYAGGYVKEPERGLWDNIVYLDFRSLYPSIIITHNVSPDTLNREGCKEYDVAPEVGHKFCKDFPGFIPSLLGDLLEERQKIKRKMKATVDPLEKKLLDYRQRLIKILANSFYGYYGYAKARWYCKECAESVTAWGREYIEMVIRELEEKFGFKVLYADTDGLHATIPGADAETVKKKAKEFLKYINPKLPGLLELEYEGFYVRGFFVTKKKYAVIDEEGKITTRGLEIVRRDWSEIAKETQARVLEAILKHGDVEEAVRIVKEVTEKLSKYEVPPEKLVIHEQITRDLRDYKATGPHVAVAKRLAARGVKIRPGTVISYIVLKGSGRIGDRAIPADEFDPTKHRYDAEYYIENQVLPAVERILKAFGYRKEDLRYQKTKQVGSGAWLKVKGKKGTEAYVEQKLISEEDLNSAVDHHHHHH

SEQ ID NO: 105 - DNA, 2409 bp, Artificial Sequence
  Description of Artificial Sequence:Thermococcus species 9degreesN-7 mutant DNA polymerase, 9degreesN mutant
atgattctcgataccgactacatcaccgagaacgggaagcccgtgataagggtcttcaagaaggagaacggcgagtttaaaatcgagtacgacagaaccttcgagccctacttctacgcccttctgaaggacgattctgcgatagaggacgtcaagaaggtaaccgcaaagaggcacggaacggttgtcaaggtgaagcgcgccgagaaggtgcagaagaagttcctcggcaggccgatagaggtctggaagctctacttcaaccatcctcaggacgtcccggcgattcgagacaggatacgcgcccaccccgctgtcgttgacatctacgagtacgacatacccttcgccaagcgctacctcatcgacaagggcctgattccgatggagggcgacgaggagcttacgatgctcgccttcgcgatcgcaaccctctatcacgagggcgaggagttcggaaccgggccgattctcatgataagctacgccgacgggagcgaggcgagggtgataacctggaagaagattgaccttccgtacgttgacgtcgtctcgaccgagaaggagatgattaagcgcttcctccgcgtcgtcagggagaaggaccccgacgtgctcatcacctacaacggcgacaacttcgacttcgcctacctgaagaagcgctgtgaggaactcggaataaagttcacactcggcagggacgggagcgagccgaagatacagcgaatgggcgaccgctttgccgttgaggtgaagggcaggattcacttcgacctctaccccgtcataaggcgcacgataaacctcccgacctacacccttgaggccgtttacgaggccgtctttggaaagcccaaggagaaggtttacgcagaggagatagcgcaggcctgggagagcggggagggccttgaaagggttgcaagatactcgatggaggacgctaaggtgacctacgagctgggaagggagttcttcccggacgaggcccagctttcgaggcttataggccagagcctctgggacgtctcgcgctcgagcaccggaaatttggtggagtggttcctcctgcggaaggcctacaagaggaacgagctcgccccaaacaagcccgacgagagggagctcgcgagacggcgcgggggctacgctggcgggtacgttaaggaaccagagcggggattgtgggacaacattgtgtatttagacttccgctcgctgtatccttcaatcatcataacccacaacgtctcgccggataccctcaaccgcgagggctgtaaagagtacgacgtcgcccctgaggttggacacaagttctgcaaggacttccccggcttcataccaagcctcctgggagatttgctcgaggagaggcagaagataaagcggaagatgaaggcaacggttgacccgctggagaagaaactcctcgattacaggcagagggccatcaaaatcctcgccaacagcttctacggctactacggctacgccaaggcccggtggtactgcaaggagtgcgccgagagcgttacggcctggggaagggagtatatagaaatggttatccgggaactcgaagaaaaattcggttttaaagttctctatgccgatacagacggtctccatgctaccattcccggagcagacgctgaaacagtcaagaaaaaagcaaaggagttcttaaaatacattaatccaaaactgcccggcctgctcgaacttgagtacgagggcttctacgtgaggggcttcttcgtcacgaagaagaagtacgctgtgatagacgaggagggcaagataaccacgaggggtcttgagattgtgaggcgcgactggagcgagatagcgaaggagacccaggccagggtcttagaggcgatactcaagcacggtgacgtcgaggaggccgttaggatagtcaaggaagtgacggaaaagctgagcaagtatgaggtcccgcccgagaagctggtaatccacgagcagataacgcgcgatttgagggattacaaagccaccggcccgcacgttgccgttgcgaagaggctcgcggcgcgtggagtgaaaatccggcccggcacggtgataagctacatcgtcctaaagggctctggaaggataggcgacagggcgattccagctgatgagttcgacccgacgaagcaccgctacgatgcggaatactacatcgagaaccaggttctcccggcggtggagaggattctaaaagccttcggctatcggaaggaggatttgcgctaccagaagacgaagcaggtcggctcgggcgcgtggctgaaggtgaaggggaagaagggtaccgaagcttacgtagaacaaaaactcatctcagaagaggatctgaatagcgccgtcgaccatcatcatcatcatcattga

SEQ ID NO: 106 - protein, 802 aa, Artificial Sequence
  Description of Artificial Sequence:Thermococcus species 9degreesN-7 mutant DNA polymerase, 9degreesN mutant
MILDTDYITENGKPVIRVFKKENGEFKIEYDRTFEPYFYALLKDDSAIEDVKKVTAKRHGTVVKVKRAEKVQKKFLGRPIEVWKLYFNHPQDVPAIRDRIRAHPAVVDIYEYDIPFAKRYLIDKGLIPMEGDEELTMLAFAIATLYHEGEEFGTGPILMISYADGSEARVITWKKIDLPYVDVVSTEKEMIKRFLRVVREKDPDVLITYNGDNFDFAYLKKRCEELGIKFTLGRDGSEPKIQRMGDRFAVEVKGRIHFDLYPVIRRTINLPTYTLEAVYEAVFGKPKEKVYAEEIAQAWESGEGLERVARYSMEDAKVTYELGREFFPDEAQLSRLIGQSLWDVSRSSTGNLVEWFLLRKAYKRNELAPNKPDERELARRRGGYAGGYVKEPERGLWDNIVYLDFRSLYPSIIITHNVSPDTLNREGCKEYDVAPEVGHKFCKDFPGFIPSLLGDLLEERQKIKRKMKATVDPLEKKLLDYRQRAIKILANSFYGYYGYAKARWYCKECAESVTAWGREYIEMVIRELEEKFGFKVLYADTDGLHATIPGADAETVKKKAKEFLKYINPKLPGLLELEYEGFYVRGFFVTKKKYAVIDEEGKITTRGLEIVRRDWSEIAKETQARVLEAILKHGDVEEAVRIVKEVTEKLSKYEVPPEKLVIHEQITRDLRDYKATGPHVAVAKRLAARGVKIRPGTVISYIVLKGSGRIGDRAIPADEFDPTKHRYDAEYYIENQVLPAVERILKAFGYRKEDLRYQKTKQVGSGAWLKVKGKKGTEAYVEQKLISEEDLNSAVDHHHHHH

SEQ ID NO: 107 - DNA, 2445 bp, Artificial Sequence
  Description of Artificial Sequence:Thermococcus species 9degreesN-7 mutant DNA polymerase, 9degreesN mutant
atgattctcgataccgactacatcaccgagaacgggaagcccgtgataagggtcttcaagaaggagaacggcgagtttaaaatcgagtacgacagaaccttcgagccctacttctacgcccttctgaaggacgattctgcgatagaggacgtcaagaaggtaaccgcaaagaggcacggaacggttgtcaaggtgaagcgcgccgagaaggtgcagaagaagttcctcggcaggccgatagaggtctggaagctctacttcaaccatcctcaggacgtcccggcgattcgagacaggatacgcgcccaccccgctgtcgttgacatctacgagtacgacatacccttcgccaagcgctacctcatcgacaagggcctgattccgatggagggcgacgaggagcttacgatgctcgccttcgcgatcgcaaccctctatcacgagggcgaggagttcggaaccgggccgattctcatgataagctacgccgacgggagcgaggcgagggtgataacctggaagaagattgaccttccgtacgttgacgtcgtctcgaccgagaaggagatgattaagcgcttcctccgcgtcgtcagggagaaggaccccgacgtgctcatcacctacaacggcgacaacttcgacttcgcctacctgaagaagcgctgtgaggaactcggaataaagttcacactcggcagggacgggagcgagccgaagatacagcgaatgggcgaccgctttgccgttgaggtgaagggcaggattcacttcgacctctaccccgtcataaggcgcacgataaacctcccgacctacacccttgaggccgtttacgaggccgtctttggaaagcccaaggagaaggtttacgcagaggagatagcgcaggcctgggagagcggggagggccttgaaagggttgcaagatactcgatggaggacgctaaggtgacctacgagctgggaagggagttcttcccgatggaggcctccgtttcgaggcttataggccagagcctctgggacgtctcgcgctcgagcaccggaaatttggtggagtggttcctcctgcggaaggcctacaagaggaacgagctcgccccaaacaagcccgacgagagggagctcgcgagacggcgcgggggctacgctggcgggtacgttaaggaaccagagcggggattgtgggacaacattgtgtatttagacttccgctcgctgtatccttcaatcatcataacccacaacgtctcgccggataccctcaaccgcgagggctgtaaagagtacgacgtcgcccctgaggttggacacaagttctgcaaggacttccccggcttcataccaagcctcctgggagatttgctcgaggagaggcagaagataaagcggaagatgaaggcaacggttgacccgctggagaagaaactcctcgattacaggcagaggacaatcaaaatcctcgccaacagttacaggcagaggcaaatcaaaatcctcgccaacagcttctacggctactacggctacgccaaggcccggtggtactgcaaggagtgcgccgagagcgttacggcctggggaagggagtatatagaaatggttatccgggaactcgaagaaaaattcggttttaaagttctctatgccgatacagacggtctccatgctaccattcccggagcagacgctgaaacagtcaagaaaaaagcaaaggagttcttaaaatacattaatccaaaactgcccggcctgctcgaacttgagtacgagggcttctacgtgaggggcttcttcgtcacgaagaagaagtacgctgtgatagacgaggagggcaagataaccacgaggggtcttgagattgtgaggcgcgactggagcgagatagcgaaggagacccaggccagggtcttagaggcgatactcaagcacggtgacgtcgaggaggccgttaggatagtcaaggaagtgacggaaaagctgagcaagtatgaggtcccgcccgagaagctggtaatccacgagcagataacgcgcgatttgagggattacaaagccaccggcccgcacgttgccgttgcgaagaggctcgcggcgcgtggagtgaaaatccggcccggcacggtgataagctacatcgtcctaaagggctctggaaggataggcgacagggcgattccagctgatgagttcgacccgacgaagcaccgctacgatgcggaatactacatcgagaaccaggttctcccggcggtggagaggattctaaaagccttcggctatcggaaggaggatttgcgctaccagaagacgaagcaggtcggctcgggcgcgtggctgaaggtgaaggggaagaagggtaccgaagcttacgtagaacaaaaactcatctcagaagaggatctgaatagcgccgtcgaccatcatcatcatcatcattga

SEQ ID NO: 108 - protein, 814 aa, Artificial Sequence
  Description of Artificial Sequence:Thermococcus species 9degreesN-7 mutant DNA polymerase, 9degreesN mutant
MILDTDYITENGKPVIRVFKKENGEFKIEYDRTFEPYFYALLKDDSAIEDVKKVTAKRHGTVVKVKRAEKVQKKFLGRPIEVWKLYFNHPQDVPAIRDRIRAHPAVVDIYEYDIPFAKRYLIDKGLIPMEGDEELTMLAFAIATLYHEGEEFGTGPILMISYADGSEARVITWKKIDLPYVDVVSTEKEMIKRFLRVVREKDPDVLITYNGDNFDFAYLKKRCEELGIKFTLGRDGSEPKIQRMGDRFAVEVKGRIHFDLYPVIRRTINLPTYTLEAVYEAVFGKPKEKVYAEEIAQAWESGEGLERVARYSMEDAKVTYELGREFFPMEASVSRLIGQSLWDVSRSSTGNLVEWFLLRKAYKRNELAPNKPDERELARRRGGYAGGYVKEPERGLWDNIVYLDFRSLYPSIIITHNVSPDTLNREGCKEYDVAPEVGHKFCKDFPGFIPSLLGDLLEERQKIKRKMKATVDPLEKKLLDYRQRTIKILANSYRQRQIKILANSFYGYYGYAKARWYCKECAESVTAWGREYIEMVIRELEEKFGFKVLYADTDGLHATIPGADAETVKKKAKEFLKYINPKLPGLLELEYEGFYVRGFFVTKKKYAVIDEEGKITTRGLEIVRRDWSEIAKETQARVLEAILKHGDVEEAVRIVKEVTEKLSKYEVPPEKLVIHEQITRDLRDYKATGPHVAVAKRLAARGVKIRPGTVISYIVLKGSGRIGDRAIPADEFDPTKHRYDAEYYIENQVLPAVERILKAFGYRKEDLRYQKTKQVGSGAWLKVKGKKGTEAYVEQKLISEEDLNSAVDHHHHHH

SEQ ID NO: 109 - DNA, 2409 bp, Artificial Sequence
  Description of Artificial Sequence:Thermococcus species 9degreesN-7 mutant DNA polymerase, 9degreesN mutant
atgattctcgataccgactacatcaccgagaacgggaagcccgtgataagggtcttcaagaaggagaacggcgagtttaaaatcgagtacgacagaaccttcgagccctacttctacgcccttctgaaggacgattctgcgatagaggacgtcaagaaggtaaccgcaaagaggcacggaacggttgtcaaggtgaagcgcgccgagaaggtgcagaagaagttcctcggcaggccgatagaggtctggaagctctacttcaaccatcctcaggacgtcccggcgattcgagacaggatacgcgcccaccccgctgtcgttgacatctacgagtacgacatacccttcgccaagcgctacctcatcgacaagggcctgattccgatggagggcgacgaggagcttacgatgctcgccttcgcgatcgcaaccctctatcacgagggcgaggagttcggaaccgggccgattctcatgataagctacgccgacgggagcgaggcgagggtgataacctggaagaagattgaccttccgtacgttgacgtcgtctcgaccgagaaggagatgattaagcgcttcctccgcgtcgtcagggagaaggaccccgacgtgctcatcacctacaacggcgacaacttcgacttcgcctacctgaagaagcgctgtgaggaactcggaataaagttcacactcggcagggacgggagcgagccgaagatacagcgaatgggcgaccgctttgccgttgaggtgaagggcaggattcacttcgacctctaccccgtcataaggcgcacgataaacctcccgacctacacccttgaggccgtttacgaggccgtctttggaaagcccaaggagaaggtttacgcagaggagatagcgcaggcctgggagagcggggagggccttgaaagggttgcaagatactcgatggaggacgctaaggtgacctacgagctgggaagggagttcttcccgatggaggcccagatctcgaggcttataggccagagcctctgggacgtctcgcgctcgagcaccggaaatttggtggagtggttcctcctgcggaaggcctacaagaggaacgagctcgccccaaacaagcccgacgagagggagctcgcgagacggcgcgggggctacgctggcgggtacgttaaggaaccagagcggggattgtgggacaacattgtgtatttagacttccgctcgctgtatccttcaatcatcataacccacaacgtctcgccggataccctcaaccgcgagggctgtaaagagtacgacgtcgcccctgaggttggacacaagttctgcaaggacttccccggcttcataccaagcctcctgggagatttgctcgaggagaggcagaagataaagcggaagatgaaggcaacggttgacccgctggagaagaaactcctcgattacaggcagaggccgatcaaaatcctcgccaacagcttctacggctactacggctacgccaaggcccggtggtactgcaaggagtgcgccgagagcgttacggcctggggaagggagtatatagaaatggttatccgggaactcgaagaaaaattcggttttaaagttctctatgccgatacagacggtctccatgctaccattcccggagcagacgctgaaacagtcaagaaaaaagcaaaggagttcttaaaatacattaatccaaaactgcccggcctgctcgaacttgagtacgagggcttctacgtgaggggcttcttcgtcacgaagaagaagtacgctgtgatagacgaggagggcaagataaccacgaggggtcttgagattgtgaggcgcgactggagcgagatagcgaaggagacccaggccagggtcttagaggcgatactcaagcacggtgacgtcgaggaggccgttaggatagtcaaggaagtgacggaaaagctgagcaagtatgaggtcccgcccgagaagctggtaatccacgagcagataacgcgcgatttgagggattacaaagccaccggcccgcacgttgccgttgcgaagaggctcgcggcgcgtggagtgaaaatccggcccggcacggtgataagctacatcgtcctaaagggctctggaaggataggcgacagggcgattccagctgatgagttcgacccgacgaagcaccgctacgatgcggaatactacatcgagaaccaggttctcccggcggtggagaggattctaaaagccttcggctatcggaaggaggatttgcgctaccagaagacgaagcaggtcggctcgggcgcgtggctgaaggtgaaggggaagaagggtaccgaagcttacgtagaacaaaaactcatctcagaagaggatctgaatagcgccgtcgaccatcatcatcatcatcattga

SEQ ID NO: 110 - protein, 802 aa, Artificial Sequence
  Description of Artificial Sequence:Thermococcus species 9degreesN-7 mutant DNA polymerase, 9degreesN mutant
MILDTDYITENGKPVIRVFKKENGEFKIEYDRTFEPYFYALLKDDSAIEDVKKVTAKRHGTVVKVKRAEKVQKKFLGRPIEVWKLYFNHPQDVPAIRDRIRAHPAVVDIYEYDIPFAKRYLIDKGLIPMEGDEELTMLAFAIATLYHEGEEFGTGPILMISYADGSEARVITWKKIDLPYVDVVSTEKEMIKRFLRVVREKDPDVLITYNGDNFDFAYLKKRCEELGIKFTLGRDGSEPKIQRMGDRFAVEVKGRIHFDLYPVIRRTINLPTYTLEAVYEAVFGKPKEKVYAEEIAQAWESGEGLERVARYSMEDAKVTYELGREFFPMEAQISRLIGQSLWDVSRSSTGNLVEWFLLRKAYKRNELAPNKPDERELARRRGGYAGGYVKEPERGLWDNIVYLDFRSLYPSIIITHNVSPDTLNREGCKEYDVAPEVGHKFCKDFPGFIPSLLGDLLEERQKIKRKMKATVDPLEKKLLDYRQRPIKILANSFYGYYGYAKARWYCKECAESVTAWGREYIEMVIRELEEKFGFKVLYADTDGLHATIPGADAETVKKKAKEFLKYINPKLPGLLELEYEGFYVRGFFVTKKKYAVIDEEGKITTRGLEIVRRDWSEIAKETQARVLEAILKHGDVEEAVRIVKEVTEKLSKYEVPPEKLVIHEQITRDLRDYKATGPHVAVAKRLAARGVKIRPGTVISYIVLKGSGRIGDRAIPADEFDPTKHRYDAEYYIENQVLPAVERILKAFGYRKEDLRYQKTKQVGSGAWLKVKGKKGTEAYVEQKLISEEDLNSAVDHHHHHH

SEQ ID NO: 111 - DNA, 2409 bp, Artificial Sequence
  Description of Artificial Sequence:Thermococcus species 9degreesN-7 mutant DNA polymerase, 9degreesN mutant
atgattctcgataccgactacatcaccgagaacgggaagcccgtgataagggtcttcaagaaggagaacggcgagtttaaaatcgagtacgacagaaccttcgagccctacttctacgcccttctgaaggacgattctgcgatagaggacgtcaagaaggtaaccgcaaagaggcacggaacggttgtcaaggtgaagcgcgccgagaaggtgcagaagaagttcctcggcaggccgatagaggtctggaagctctacttcaaccatcctcaggacgtcccggcgattcgagacaggatacgcgcccaccccgctgtcgttgacatctacgagtacgacatacccttcgccaagcgctacctcatcgacaagggcctgattccgatggagggcgacgaggagcttacgatgctcgccttcgcgatcgcaaccctctatcacgagggcgaggagttcggaaccgggccgattctcatgataagctacgccgacgggagcgaggcgagggtgataacctggaagaagattgaccttccgtacgttgacgtcgtctcgaccgagaaggagatgattaagcgcttcctccgcgtcgtcagggagaaggaccccgacgtgctcatcacctacaacggcgacaacttcgacttcgcctacctgaagaagcgctgtgaggaactcggaataaagttcacactcggcagggacgggagcgagccgaagatacagcgaatgggcgaccgctttgccgttgaggtgaagggcaggattcacttcgacctctaccccgtcataaggcgcacgataaacctcccgacctacacccttgaggccgtttacgaggccgtctttggaaagcccaaggagaaggtttacgcagaggagatagcgcaggcctgggagagcggggagggccttgaaagggttgcaagatactcgatggaggacgctaaggtgacctacgagctgggaagggagttcttcccgatggaggcccagatctcgaggcttataggccagagcctctgggacgtctcgcgctcgagcaccggaaatttggtggagtggttcctcctgcggaaggcctacaagaggaacgagctcgccccaaacaagcccgacgagagggagctcgcgagacggcgcgggggctacgctggcgggtacgttaaggaaccagagcggggattgtgggacaacattgtgtatttagacttccgctcgctgtatccttcaatcatcataacccacaacgtctcgccggataccctcaaccgcgagggctgtaaagagtacgacgtcgcccctgaggttggacacaagttctgcaaggacttccccggcttcataccaagcctcctgggagatttgctcgaggagaggcagaagataaagcggaagatgaaggcaacggttgacccgctggagaagaaactcctcgattacaggcagaggttaatcaaaatcctcgccaacagcttctacggctactacggctacgccaaggcccggtggtactgcaaggagtgcgccgagagcgttacggcctggggaagggagtatatagaaatggttatccgggaactcgaagaaaaattcggttttaaagttctctatgccgatacagacggtctccatgctaccattcccggagcagacgctgaaacagtcaagaaaaaagcaaaggagttcttaaaatacattaatccaaaactgcccggcctgctcgaacttgagtacgagggcttctacgtgaggggcttcttcgtcacgaagaagaagtacgctgtgatagacgaggagggcaagataaccacgaggggtcttgagattgtgaggcgcgactggagcgagatagcgaaggagacccaggccagggtcttagaggcgatactcaagcacggtgacgtcgaggaggccgttaggatagtcaaggaagtgacggaaaagctgagcaagtatgaggtcccgcccgagaagctggtaatccacgagcagataacgcgcgatttgagggattacaaagccaccggcccgcacgttgccgttgcgaagaggctcgcggcgcgtggagtgaaaatccggcccggcacggtgataagctacatcgtcctaaagggctctggaaggataggcgacagggcgattccagctgatgagttcgacccgacgaagcaccgctacgatgcggaatactacatcgagaaccaggttctcccggcggtggagaggattctaaaagccttcggctatcggaaggaggatttgcgctaccagaagacgaagcaggtcggctcgggcgcgtggctgaaggtgaaggggaagaagggtaccgaagcttacgtagaacaaaaactcatctcagaagaggatctgaatagcgccgtcgaccatcatcatcatcatcattga

SEQ ID NO: 112 - protein, 802 aa, Artificial Sequence
  Description of Artificial Sequence:Thermococcus species 9degreesN-7 mutant DNA polymerase, 9degreesN mutant
MILDTDYITENGKPVIRVFKKENGEFKIEYDRTFEPYFYALLKDDSAIEDVKKVTAKRHGTVVKVKRAEKVQKKFLGRPIEVWKLYFNHPQDVPAIRDRIRAHPAVVDIYEYDIPFAKRYLIDKGLIPMEGDEELTMLAFAIATLYHEGEEFGTGPILMISYADGSEARVITWKKIDLPYVDVVSTEKEMIKRFLRVVREKDPDVLITYNGDNFDFAYLKKRCEELGIKFTLGRDGSEPKIQRMGDRFAVEVKGRIHFDLYPVIRRTINLPTYTLEAVYEAVFGKPKEKVYAEEIAQAWESGEGLERVARYSMEDAKVTYELGREFFPMEAQISRLIGQSLWDVSRSSTGNLVEWFLLRKAYKRNELAPNKPDERELARRRGGYAGGYVKEPERGLWDNIVYLDFRSLYPSIIITHNVSPDTLNREGCKEYDVAPEVGHKFCKDFPGFIPSLLGDLLEERQKIKRKMKATVDPLEKKLLDYRQRLIKILANSFYGYYGYAKARWYCKECAESVTAWGREYIEMVIRELEEKFGFKVLYADTDGLHATIPGADAETVKKKAKEFLKYINPKLPGLLELEYEGFYVRGFFVTKKKYAVIDEEGKITTRGLEIVRRDWSEIAKETQARVLEAILKHGDVEEAVRIVKEVTEKLSKYEVPPEKLVIHEQITRDLRDYKATGPHVAVAKRLAARGVKIRPGTVISYIVLKGSGRIGDRAIPADEFDPTKHRYDAEYYIENQVLPAVERILKAFGYRKEDLRYQKTKQVGSGAWLKVKGKKGTEAYVEQKLISEEDLNSAVDHHHHHH

SEQ ID NO: 113 - DNA, 2409 bp, Artificial Sequence
  Description of Artificial Sequence:Thermococcus species 9degreesN-7 mutant DNA polymerase, 9degreesN mutant
atgattctcgataccgactacatcaccgagaacgggaagcccgtgataagggtcttcaagaaggagaacggcgagtttaaaatcgagtacgacagaaccttcgagccctacttctacgcccttctgaaggacgattctgcgatagaggacgtcaagaaggtaaccgcaaagaggcacggaacggttgtcaaggtgaagcgcgccgagaaggtgcagaagaagttcctcggcaggccgatagaggtctggaagctctacttcaaccatcctcaggacgtcccggcgattcgagacaggatacgcgcccaccccgctgtcgttgacatctacgagtacgacatacccttcgccaagcgctacctcatcgacaagggcctgattccgatggagggcgacgaggagcttacgatgctcgccttcgcgatcgcaaccctctatcacgagggcgaggagttcggaaccgggccgattctcatgataagctacgccgacgggagcgaggcgagggtgataacctggaagaagattgaccttccgtacgttgacgtcgtctcgaccgagaaggagatgattaagcgcttcctccgcgtcgtcagggagaaggaccccgacgtgctcatcacctacaacggcgacaacttcgacttcgcctacctgaagaagcgctgtgaggaactcggaataaagttcacactcggcagggacgggagcgagccgaagatacagcgaatgggcgaccgctttgccgttgaggtgaagggcaggattcacttcgacctctaccccgtcataaggcgcacgataaacctcccgacctacacccttgaggccgtttacgaggccgtctttggaaagcccaaggagaaggtttacgcagaggagatagcgcaggcctgggagagcggggagggccttgaaagggttgcaagatactcgatggaggacgctaaggtgacctacgagctgggaagggagttcttcccgatggaggcccagctttcgaggcttataggccagagcctctgggacgtctcgcgctcgagcaccggaaatttggtggagtggttcctcctgcggaaggcctacaagaggaacgagctcgccccaaacaagcccgacgagagggagctcgcgagacggcgcgggggctacgctggcgggtacgttaaggaaccagagcggggattgtgggacaacattgtgtatttagacttccgctcgctgtatccttcaatcatcataacccacaacgtctcgccggataccctcaaccgcgagggctgtaaagagtacgacgtcgcccctgaggttggacacaagttctgcaaggacttccccggcttcataccaagcctcctgggagatttgctcgaggagaggcagaagataaagcggaagatgaaggcaacggttgacccgctggagaagaaactcctcgattacaggcagaggactatcaaaatcctcgccaacagcttctacggctactacggctacgccaaggcccggtggtactgcaaggagtgcgccgagagcgttacggcctggggaagggagtatatagaaatggttatccgggaactcgaagaaaaattcggttttaaagttctctatgccgatacagacggtctccatgctaccattcccggagcagacgctgaaacagtcaagaaaaaagcaaaggagttcttaaaatacattaatccaaaactgcccggcctgctcgaacttgagtacgagggcttctacgtgaggggcttcttcgtcacgaagaagaagtacgctgtgatagacgaggagggcaagataaccacgaggggtcttgagattgtgaggcgcgactggagcgagatagcgaaggagacccaggccagggtcttagaggcgatactcaagcacggtgacgtcgaggaggccgttaggatagtcaaggaagtgacggaaaagctgagcaagtatgaggtcccgcccgagaagctggtaatccacgagcagataacgcgcgatttgagggattacaaagccaccggcccgcacgttgccgttgcgaagaggctcgcggcgcgtggagtgaaaatccggcccggcacggtgataagctacatcgtcctaaagggctctggaaggataggcgacagggcgattccagctgatgagttcgacccgacgaagcaccgctacgatgcggaatactacatcgagaaccaggttctcccggcggtggagaggattctaaaagccttcggctatcggaaggaggatttgcgctaccagaagacgaagcaggtcggctcgggcgcgtggctgaaggtgaaggggaagaagggtaccgaagcttacgtagaacaaaaactcatctcagaagaggatctgaatagcgccgtcgaccatcatcatcatcatcattga

SEQ ID NO: 114 - protein, 802 aa, Artificial Sequence
  Description of Artificial Sequence:Thermococcus species 9degreesN-7 mutant DNA polymerase, 9degreesN mutant
MILDTDYITENGKPVIRVFKKENGEFKIEYDRTFEPYFYALLKDDSAIEDVKKVTAKRHGTVVKVKRAEKVQKKFLGRPIEVWKLYFNHPQDVPAIRDRIRAHPAVVDIYEYDIPFAKRYLIDKGLIPMEGDEELTMLAFAIATLYHEGEEFGTGPILMISYADGSEARVITWKKIDLPYVDVVSTEKEMIKRFLRVVREKDPDVLITYNGDNFDFAYLKKRCEELGIKFTLGRDGSEPKIQRMGDRFAVEVKGRIHFDLYPVIRRTINLPTYTLEAVYEAVFGKPKEKVYAEEIAQAWESGEGLERVARYSMEDAKVTYELGREFFPMEAQLSRLIGQSLWDVSRSSTGNLVEWFLLRKAYKRNELAPNKPDERELARRRGGYAGGYVKEPERGLWDNIVYLDFRSLYPSIIITHNVSPDTLNREGCKEYDVAPEVGHKFCKDFPGFIPSLLGDLLEERQKIKRKMKATVDPLEKKLLDYRQRTIKILANSFYGYYGYAKARWYCKECAESVTAWGREYIEMVIRELEEKFGFKVLYADTDGLHATIPGADAETVKKKAKEFLKYINPKLPGLLELEYEGFYVRGFFVTKKKYAVIDEEGKITTRGLEIVRRDWSEIAKETQARVLEAILKHGDVEEAVRIVKEVTEKLSKYEVPPEKLVIHEQITRDLRDYKATGPHVAVAKRLAARGVKIRPGTVISYIVLKGSGRIGDRAIPADEFDPTKHRYDAEYYIENQVLPAVERILKAFGYRKEDLRYQKTKQVGSGAWLKVKGKKGTEAYVEQKLISEEDLNSAVDHHHHHH

SEQ ID NO: 115 - DNA, 2409 bp, Artificial Sequence
  Description of Artificial Sequence:Thermococcus species 9degreesN-7 mutant DNA polymerase, 9degreesN mutant
atgattctcgataccgactacatcaccgagaacgggaagcccgtgataagggtcttcaagaaggagaacggcgagtttaaaatcgagtacgacagaaccttcgagccctacttctacgcccttctgaaggacgattctgcgatagaggacgtcaagaaggtaaccgcaaagaggcacggaacggttgtcaaggtgaagcgcgccgagaaggtgcagaagaagttcctcggcaggccgatagaggtctggaagctctacttcaaccatcctcaggacgtcccggcgattcgagacaggatacgcgcccaccccgctgtcgttgacatctacgagtacgacatacccttcgccaagcgctacctcatcgacaagggcctgattccgatggagggcgacgaggagcttacgatgctcgccttcgcgatcgcaaccctctatcacgagggcgaggagttcggaaccgggccgattctcatgataagctacgccgacgggagcgaggcgagggtgataacctggaagaagattgaccttccgtacgttgacgtcgtctcgaccgagaaggagatgattaagcgcttcctccgcgtcgtcagggagaaggaccccgacgtgctcatcacctacaacggcgacaacttcgacttcgcctacctgaagaagcgctgtgaggaactcggaataaagttcacactcggcagggacgggagcgagccgaagatacagcgaatgggcgaccgctttgccgttgaggtgaagggcaggattcacttcgacctctaccccgtcataaggcgcacgataaacctcccgacctacacccttgaggccgtttacgaggccgtctttggaaagcccaaggagaaggtttacgcagaggagatagcgcaggcctgggagagcggggagggccttgaaagggttgcaagatactcgatggaggacgctaaggtgacctacgagctgggaagggagttcttcccgatggaggcccagctttcgaggcttataggccagagcctctgggacgtctcgcgctcgagcaccggaaatttggtggagtggttcctcctgcggaaggcctacaagaggaacgagctcgccccaaacaagcccgacgagagggagctcgcgagacggcgcgggggctacgctggcgggtacgttaaggaaccagagcggggattgtgggacaacattgtgtatttagacttccgctcgctgtatccttcaatcatcataacccacaacgtctcgccggataccctcaaccgcgagggctgtaaagagtacgacgtcgcccctgaggttggacacaagttctgcaaggacttccccggcttcataccaagcctcctgggagatttgctcgaggagaggcagaagataaagcggaagatgaaggcaacggttgacccgctggagaagaaactcctcgattacaggcagaggagtatcaaaatcctcgccaacagcttctacggctactacggctacgccaaggcccggtggtactgcaaggagtgcgccgagagcgttacggcctggggaagggagtatatagaaatggttatccgggaactcgaagaaaaattcggttttaaagttctctatgccgatacagacggtctccatgctaccattcccggagcagacgctgaaacagtcaagaaaaaagcaaaggagttcttaaaatacattaatccaaaactgcccggcctgctcgaacttgagtacgagggcttctacgtgaggggcttcttcgtcacgaagaagaagtacgctgtgatagacgaggagggcaagataaccacgaggggtcttgagattgtgaggcgcgactggagcgagatagcgaaggagacccaggccagggtcttagaggcgatactcaagcacggtgacgtcgaggaggccgttaggatagtcaaggaagtgacggaaaagctgagcaagtatgaggtcccgcccgagaagctggtaatccacgagcagataacgcgcgatttgagggattacaaagccaccggcccgcacgttgccgttgcgaagaggctcgcggcgcgtggagtgaaaatccggcccggcacggtgataagctacatcgtcctaaagggctctggaaggataggcgacagggcgattccagctgatgagttcgacccgacgaagcaccgctacgatgcggaatactacatcgagaaccaggttctcccggcggtggagaggattctaaaagccttcggctatcggaaggaggatttgcgctaccagaagacgaagcaggtcggctcgggcgcgtggctgaaggtgaaggggaagaagggtaccgaagcttacgtagaacaaaaactcatctcagaagaggatctgaatagcgccgtcgaccatcatcatcatcatcattga

SEQ ID NO: 116 - protein, 802 aa, Artificial Sequence
  Description of Artificial Sequence:Thermococcus species 9degreesN-7 mutant DNA polymerase, 9degreesN mutant
MILDTDYITENGKPVIRVFKKENGEFKIEYDRTFEPYFYALLKDDSAIEDVKKVTAKRHGTVVKVKRAEKVQKKFLGRPIEVWKLYFNHPQDVPAIRDRIRAHPAVVDIYEYDIPFAKRYLIDKGLIPMEGDEELTMLAFAIATLYHEGEEFGTGPILMISYADGSEARVITWKKIDLPYVDVVSTEKEMIKRFLRVVREKDPDVLITYNGDNFDFAYLKKRCEELGIKFTLGRDGSEPKIQRMGDRFAVEVKGRIHFDLYPVIRRTINLPTYTLEAVYEAVFGKPKEKVYAEEIAQAWESGEGLERVARYSMEDAKVTYELGREFFPMEAQLSRLIGQSLWDVSRSSTGNLVEWFLLRKAYKRNELAPNKPDERELARRRGGYAGGYVKEPERGLWDNIVYLDFRSLYPSIIITHNVSPDTLNREGCKEYDVAPEVGHKFCKDFPGFIPSLLGDLLEERQKIKRKMKATVDPLEKKLLDYRQRSIKILANSFYGYYGYAKARWYCKECAESVTAWGREYIEMVIRELEEKFGFKVLYADTDGLHATIPGADAETVKKKAKEFLKYINPKLPGLLELEYEGFYVRGFFVTKKKYAVIDEEGKITTRGLEIVRRDWSEIAKETQARVLEAILKHGDVEEAVRIVKEVTEKLSKYEVPPEKLVIHEQITRDLRDYKATGPHVAVAKRLAARGVKIRPGTVISYIVLKGSGRIGDRAIPADEFDPTKHRYDAEYYIENQVLPAVERILKAFGYRKEDLRYQKTKQVGSGAWLKVKGKKGTEAYVEQKLISEEDLNSAVDHHHHHH

SEQ ID NO: 117 - DNA, 2409 bp, Artificial Sequence
  Description of Artificial Sequence:Thermococcus species 9degreesN-7 mutant DNA polymerase, 9degreesN mutant
atgattctcgataccgactacatcaccgagaacgggaagcccgtgataagggtcttcaagaaggagaacggcgagtttaaaatcgagtacgacagaaccttcgagccctacttctacgcccttctgaaggacgattctgcgatagaggacgtcaagaaggtaaccgcaaagaggcacggaacggttgtcaaggtgaagcgcgccgagaaggtgcagaagaagttcctcggcaggccgatagaggtctggaagctctacttcaaccatcctcaggacgtcccggcgattcgagacaggatacgcgcccaccccgctgtcgttgacatctacgagtacgacatacccttcgccaagcgctacctcatcgacaagggcctgattccgatggagggcgacgaggagcttacgatgctcgccttcgcgatcgcaaccctctatcacgagggcgaggagttcggaaccgggccgattctcatgataagctacgccgacgggagcgaggcgagggtgataacctggaagaagattgaccttccgtacgttgacgtcgtctcgaccgagaaggagatgattaagcgcttcctccgcgtcgtcagggagaaggaccccgacgtgctcatcacctacaacggcgacaacttcgacttcgcctacctgaagaagcgctgtgaggaactcggaataaagttcacactcggcagggacgggagcgagccgaagatacagcgaatgggcgaccgctttgccgttgaggtgaagggcaggattcacttcgacctctaccccgtcataaggcgcacgataaacctcccgacctacacccttgaggccgtttacgaggccgtctttggaaagcccaaggagaaggtttacgcagaggagatagcgcaggcctgggagagcggggagggccttgaaagggttgcaagatactcgatggaggacgctaaggtgacctacgagctgggaagggagttcttcccgatggaggcccagctttcgaggcttataggccagagcctctgggacgtctcgcgctcgagcaccggaaatttggtggagtggttcctcctgcggaaggcctacaagaggaacgagctcgccccaaacaagcccgacgagagggagctcgcgagacggcgcgggggctacgctggcgggtacgttaaggaaccagagcggggattgtgggacaacattgtgtatttagacttccgctcgctgtatccttcaatcatcataacccacaacgtctcgccggataccctcaaccgcgagggctgtaaagagtacgacgtcgcccctgaggttggacacaagttctgcaaggacttccccggcttcataccaagcctcctgggagatttgctcgaggagaggcagaagataaagcggaagatgaaggcaacggttgacccgctggagaagaaactcctcgattacaggtggtggcttataaaaatcctcgccaacagcttctacggctactacggctacgccaaggcccggtggtactgcaaggagtgcgccgagagcgttacggcctggggaagggagtatatagaaatggttatccgggaactcgaagaaaaattcggttttaaagttctctatgccgatacagacggtctccatgctaccattcccggagcagacgctgaaacagtcaagaaaaaagcaaaggagttcttaaaatacattaatccaaaactgcccggcctgctcgaacttgagtacgagggcttctacgtgaggggcttcttcgtcacgaagaagaagtacgctgtgatagacgaggagggcaagataaccacgaggggtcttgagattgtgaggcgcgactggagcgagatagcgaaggagacccaggccagggtcttagaggcgatactcaagcacggtgacgtcgaggaggccgttaggatagtcaaggaagtgacggaaaagctgagcaagtatgaggtcccgcccgagaagctggtaatccacgagcagataacgcgcgatttgagggattacaaagccaccggcccgcacgttgccgttgcgaagaggctcgcggcgcgtggagtgaaaatccggcccggcacggtgataagctacatcgtcctaaagggctctggaaggataggcgacagggcgattccagctgatgagttcgacccgacgaagcaccgctacgatgcggaatactacatcgagaaccaggttctcccggcggtggagaggattctaaaagccttcggctatcggaaggaggatttgcgctaccagaagacgaagcaggtcggctcgggcgcgtggctgaaggtgaaggggaagaagggtaccgaagcttacgtagaacaaaaactcatctcagaagaggatctgaatagcgccgtcgaccatcatcatcatcatcattga

SEQ ID NO: 118 - protein, 802 aa, Artificial Sequence
  Description of Artificial Sequence:Thermococcus species 9degreesN-7 mutant DNA polymerase, 9degreesN mutant
MILDTDYITENGKPVIRVFKKENGEFKIEYDRTFEPYFYALLKDDSAIEDVKKVTAKRHGTVVKVKRAEKVQKKFLGRPIEVWKLYFNHPQDVPAIRDRIRAHPAVVDIYEYDIPFAKRYLIDKGLIPMEGDEELTMLAFAIATLYHEGEEFGTGPILMISYADGSEARVITWKKIDLPYVDVVSTEKEMIKRFLRVVREKDPDVLITYNGDNFDFAYLKKRCEELGIKFTLGRDGSEPKIQRMGDRFAVEVKGRIHFDLYPVIRRTINLPTYTLEAVYEAVFGKPKEKVYAEEIAQAWESGEGLERVARYSMEDAKVTYELGREFFPMEAQLSRLIGQSLWDVSRSSTGNLVEWFLLRKAYKRNELAPNKPDERELARRRGGYAGGYVKEPERGLWDNIVYLDFRSLYPSIIITHNVSPDTLNREGCKEYDVAPEVGHKFCKDFPGFIPSLLGDLLEERQKIKRKMKATVDPLEKKLLDYRWWLIKILANSFYGYYGYAKARWYCKECAESVTAWGREYIEMVIRELEEKFGFKVLYADTDGLHATIPGADAETVKKKAKEFLKYINPKLPGLLELEYEGFYVRGFFVTKKKYAVIDEEGKITTRGLEIVRRDWSEIAKETQARVLEAILKHGDVEEAVRIVKEVTEKLSKYEVPPEKLVIHEQITRDLRDYKATGPHVAVAKRLAARGVKIRPGTVISYIVLKGSGRIGDRAIPADEFDPTKHRYDAEYYIENQVLPAVERILKAFGYRKEDLRYQKTKQVGSGAWLKVKGKKGTEAYVEQKLISEEDLNSAVDHHHHHH

SEQ ID NO: 119 - DNA, 2409 bp, Artificial Sequence
  Description of Artificial Sequence:Thermococcus species 9degreesN-7 mutant DNA polymerase, 9degreesN mutant
atgattctcgataccgactacatcaccgagaacgggaagcccgtgataagggtcttcaagaaggagaacggcgagtttaaaatcgagtacgacagaaccttcgagccctacttctacgcccttctgaaggacgattctgcgatagaggacgtcaagaaggtaaccgcaaagaggcacggaacggttgtcaaggtgaagcgcgccgagaaggtgcagaagaagttcctcggcaggccgatagaggtctggaagctctacttcaaccatcctcaggacgtcccggcgattcgagacaggatacgcgcccaccccgctgtcgttgacatctacgagtacgacatacccttcgccaagcgctacctcatcgacaagggcctgattccgatggagggcgacgaggagcttacgatgctcgccttcgcgatcgcaaccctctatcacgagggcgaggagttcggaaccgggccgattctcatgataagctacgccgacgggagcgaggcgagggtgataacctggaagaagattgaccttccgtacgttgacgtcgtctcgaccgagaaggagatgattaagcgcttcctccgcgtcgtcagggagaaggaccccgacgtgctcatcacctacaacggcgacaacttcgacttcgcctacctgaagaagcgctgtgaggaactcggaataaagttcacactcggcagggacgggagcgagccgaagatacagcgaatgggcgaccgctttgccgttgaggtgaagggcaggattcacttcgacctctaccccgtcataaggcgcacgataaacctcccgacctacacccttgaggccgtttacgaggccgtctttggaaagcccaaggagaaggtttacgcagaggagatagcgcaggcctgggagagcggggagggccttgaaagggttgcaagatactcgatggaggacgctaaggtgacctacgagctgggaagggagttcttcccgatggaggcccagctttcgaggcttataggccagagcctctgggacgtctcgcgctcgagcaccggaaatttggtggagtggttcctcctgcggaaggcctacaagaggaacgagctcgccccaaacaagcccgacgagagggagctcgcgagacggcgcgggggctacgctggcgggtacgttaaggaaccagagcggggattgtgggacaacattgtgtatttagacttccgctcgctgtatccttcaatcatcataacccacaacgtctcgccggataccctcaaccgcgagggctgtaaagagtacgacgtcgcccctgaggttggacacaagttctgcaaggacttccccggcttcataccaagcctcctgggagatttgctcgaggagaggcagaagataaagcggaagatgaaggcaacggttgacccgctggagaagaaactcctcgattacaggctatggcttataaaaatcctcgccaacagcttctacggctactacggctacgccaaggcccggtggtactgcaaggagtgcgccgagagcgttacggcctggggaagggagtatatagaaatggttatccgggaactcgaagaaaaattcggttttaaagttctctatgccgatacagacggtctccatgctaccattcccggagcagacgctgaaacagtcaagaaaaaagcaaaggagttcttaaaatacattaatccaaaactgcccggcctgctcgaacttgagtacgagggcttctacgtgaggggcttcttcgtcacgaagaagaagtacgctgtgatagacgaggagggcaagataaccacgaggggtcttgagattgtgaggcgcgactggagcgagatagcgaaggagacccaggccagggtcttagaggcgatactcaagcacggtgacgtcgaggaggccgttaggatagtcaaggaagtgacggaaaagctgagcaagtatgaggtcccgcccgagaagctggtaatccacgagcagataacgcgcgatttgagggattacaaagccaccggcccgcacgttgccgttgcgaagaggctcgcggcgcgtggagtgaaaatccggcccggcacggtgataagctacatcgtcctaaagggctctggaaggataggcgacagggcgattccagctgatgagttcgacccgacgaagcaccgctacgatgcggaatactacatcgagaaccaggttctcccggcggtggagaggattctaaaagccttcggctatcggaaggaggatttgcgctaccagaagacgaagcaggtcggctcgggcgcgtggctgaaggtgaaggggaagaagggtaccgaagcttacgtagaacaaaaactcatctcagaagaggatctgaatagcgccgtcgaccatcatcatcatcatcattga

SEQ ID NO: 120 - protein, 802 aa, Artificial Sequence
  Description of Artificial Sequence:Thermococcus species 9degreesN-7 mutant DNA polymerase, 9degreesN mutant
MILDTDYITENGKPVIRVFKKENGEFKIEYDRTFEPYFYALLKDDSAIEDVKKVTAKRHGTVVKVKRAEKVQKKFLGRPIEVWKLYFNHPQDVPAIRDRIRAHPAVVDIYEYDIPFAKRYLIDKGLIPMEGDEELTMLAFAIATLYHEGEEFGTGPILMISYADGSEARVITWKKIDLPYVDVVSTEKEMIKRFLRVVREKDPDVLITYNGDNFDFAYLKKRCEELGIKFTLGRDGSEPKIQRMGDRFAVEVKGRIHFDLYPVIRRTINLPTYTLEAVYEAVFGKPKEKVYAEEIAQAWESGEGLERVARYSMEDAKVTYELGREFFPMEAQLSRLIGQSLWDVSRSSTGNLVEWFLLRKAYKRNELAPNKPDERELARRRGGYAGGYVKEPERGLWDNIVYLDFRSLYPSIIITHNVSPDTLNREGCKEYDVAPEVGHKFCKDFPGFIPSLLGDLLEERQKIKRKMKATVDPLEKKLLDYRLWLIKILANSFYGYYGYAKARWYCKECAESVTAWGREYIEMVIRELEEKFGFKVLYADTDGLHATIPGADAETVKKKAKEFLKYINPKLPGLLELEYEGFYVRGFFVTKKKYAVIDEEGKITTRGLEIVRRDWSEIAKETQARVLEAILKHGDVEEAVRIVKEVTEKLSKYEVPPEKLVIHEQITRDLRDYKATGPHVAVAKRLAARGVKIRPGTVISYIVLKGSGRIGDRAIPADEFDPTKHRYDAEYYIENQVLPAVERILKAFGYRKEDLRYQKTKQVGSGAWLKVKGKKGTEAYVEQKLISEEDLNSAVDHHHHHH

SEQ ID NO: 121 - DNA, 2409 bp, Artificial Sequence
  Description of Artificial Sequence:Thermococcus species 9degreesN-7 mutant DNA polymerase, 9degreesN mutant
atgattctcgataccgactacatcaccgagaacgggaagcccgtgataagggtcttcaagaaggagaacggcgagtttaaaatcgagtacgacagaaccttcgagccctacttctacgcccttctgaaggacgattctgcgatagaggacgtcaagaaggtaaccgcaaagaggcacggaacggttgtcaaggtgaagcgcgccgagaaggtgcagaagaagttcctcggcaggccgatagaggtctggaagctctacttcaaccatcctcaggacgtcccggcgattcgagacaggatacgcgcccaccccgctgtcgttgacatctacgagtacgacatacccttcgccaagcgctacctcatcgacaagggcctgattccgatggagggcgacgaggagcttacgatgctcgccttcgcgatcgcaaccctctatcacgagggcgaggagttcggaaccgggccgattctcatgataagctacgccgacgggagcgaggcgagggtgataacctggaagaagattgaccttccgtacgttgacgtcgtctcgaccgagaaggagatgattaagcgcttcctccgcgtcgtcagggagaaggaccccgacgtgctcatcacctacaacggcgacaacttcgacttcgcctacctgaagaagcgctgtgaggaactcggaataaagttcacactcggcagggacgggagcgagccgaagatacagcgaatgggcgaccgctttgccgttgaggtgaagggcaggattcacttcgacctctaccccgtcataaggcgcacgataaacctcccgacctacacccttgaggccgtttacgaggccgtctttggaaagcccaaggagaaggtttacgcagaggagatagcgcaggcctgggagagcggggagggccttgaaagggttgcaagatactcgatggaggacgctaaggtgacctacgagctgggaagggagttcttcccgatggaggcccagctttcgaggcttataggccagagcctctgggacgtctcgcgctcgagcaccggaaatttggtggagtggttcctcctgcggaaggcctacaagaggaacgagctcgccccaaacaagcccgacgagagggagctcgcgagacggcgcgggggctacgctggcgggtacgttaaggaaccagagcggggattgtgggacaacattgtgtatttagacttccgctcgctgtatccttcaatcatcataacccacaacgtctcgccggataccctcaaccgcgagggctgtaaagagtacgacgtcgcccctgaggttggacacaagttctgcaaggacttccccggcttcataccaagcctcctgggagatttgctcgaggagaggcagaagataaagcggaagatgaaggcaacggttgacccgctggagaagaaactcctcgattacaggatgtggcttataaaaatcctcgccaacagcttctacggctactacggctacgccaaggcccggtggtactgcaaggagtgcgccgagagcgttacggcctggggaagggagtatatagaaatggttatccgggaactcgaagaaaaattcggttttaaagttctctatgccgatacagacggtctccatgctaccattcccggagcagacgctgaaacagtcaagaaaaaagcaaaggagttcttaaaatacattaatccaaaactgcccggcctgctcgaacttgagtacgagggcttctacgtgaggggcttcttcgtcacgaagaagaagtacgctgtgatagacgaggagggcaagataaccacgaggggtcttgagattgtgaggcgcgactggagcgagatagcgaaggagacccaggccagggtcttagaggcgatactcaagcacggtgacgtcgaggaggccgttaggatagtcaaggaagtgacggaaaagctgagcaagtatgaggtcccgcccgagaagctggtaatccacgagcagataacgcgcgatttgagggattacaaagccaccggcccgcacgttgccgttgcgaagaggctcgcggcgcgtggagtgaaaatccggcccggcacggtgataagctacatcgtcctaaagggctctggaaggataggcgacagggcgattccagctgatgagttcgacccgacgaagcaccgctacgatgcggaatactacatcgagaaccaggttctcccggcggtggagaggattctaaaagccttcggctatcggaaggaggatttgcgctaccagaagacgaagcaggtcggctcgggcgcgtggctgaaggtgaaggggaagaagggtaccgaagcttacgtagaacaaaaactcatctcagaagaggatctgaatagcgccgtcgaccatcatcatcatcatcattga

SEQ ID NO: 122 - protein, 802 aa, Artificial Sequence
  Description of Artificial Sequence:Thermococcus species 9degreesN-7 mutant DNA polymerase, 9degreesN mutant
MILDTDYITENGKPVIRVFKKENGEFKIEYDRTFEPYFYALLKDDSAIEDVKKVTAKRHGTVVKVKRAEKVQKKFLGRPIEVWKLYFNHPQDVPAIRDRIRAHPAVVDIYEYDIPFAKRYLIDKGLIPMEGDEELTMLAFAIATLYHEGEEFGTGPILMISYADGSEARVITWKKIDLPYVDVVSTEKEMIKRFLRVVREKDPDVLITYNGDNFDFAYLKKRCEELGIKFTLGRDGSEPKIQRMGDRFAVEVKGRIHFDLYPVIRRTINLPTYTLEAVYEAVFGKPKEKVYAEEIAQAWESGEGLERVARYSMEDAKVTYELGREFFPMEAQLSRLIGQSLWDVSRSSTGNLVEWFLLRKAYKRNELAPNKPDERELARRRGGYAGGYVKEPERGLWDNIVYLDFRSLYPSIIITHNVSPDTLNREGCKEYDVAPEVGHKFCKDFPGFIPSLLGDLLEERQKIKRKMKATVDPLEKKLLDYRMWLIKILANSFYGYYGYAKARWYCKECAESVTAWGREYIEMVIRELEEKFGFKVLYADTDGLHATIPGADAETVKKKAKEFLKYINPKLPGLLELEYEGFYVRGFFVTKKKYAVIDEEGKITTRGLEIVRRDWSEIAKETQARVLEAILKHGDVEEAVRIVKEVTEKLSKYEVPPEKLVIHEQITRDLRDYKATGPHVAVAKRLAARGVKIRPGTVISYIVLKGSGRIGDRAIPADEFDPTKHRYDAEYYIENQVLPAVERILKAFGYRKEDLRYQKTKQVGSGAWLKVKGKKGTEAYVEQKLISEEDLNSAVDHHHHHH

SEQ ID NO: 123 - DNA, 2409 bp, Artificial Sequence
  Description of Artificial Sequence:Thermococcus species 9degreesN-7 mutant DNA polymerase, 9degreesN mutant
atgattctcgataccgactacatcaccgagaacgggaagcccgtgataagggtcttcaagaaggagaacggcgagtttaaaatcgagtacgacagaaccttcgagccctacttctacgcccttctgaaggacgattctgcgatagaggacgtcaagaaggtaaccgcaaagaggcacggaacggttgtcaaggtgaagcgcgccgagaaggtgcagaagaagttcctcggcaggccgatagaggtctggaagctctacttcaaccatcctcaggacgtcccggcgattcgagacaggatacgcgcccaccccgctgtcgttgacatctacgagtacgacatacccttcgccaagcgctacctcatcgacaagggcctgattccgatggagggcgacgaggagcttacgatgctcgccttcgcgatcgcaaccctctatcacgagggcgaggagttcggaaccgggccgattctcatgataagctacgccgacgggagcgaggcgagggtgataacctggaagaagattgaccttccgtacgttgacgtcgtctcgaccgagaaggagatgattaagcgcttcctccgcgtcgtcagggagaaggaccccgacgtgctcatcacctacaacggcgacaacttcgacttcgcctacctgaagaagcgctgtgaggaactcggaataaagttcacactcggcagggacgggagcgagccgaagatacagcgaatgggcgaccgctttgccgttgaggtgaagggcaggattcacttcgacctctaccccgtcataaggcgcacgataaacctcccgacctacacccttgaggccgtttacgaggccgtctttggaaagcccaaggagaaggtttacgcagaggagatagcgcaggcctgggagagcggggagggccttgaaagggttgcaagatactcgatggaggacgctaaggtgacctacgagctgggaagggagttcttcccgatggaggcccagctttcgaggcttataggccagagcctctgggacgtctcgcgctcgagcaccggaaatttggtggagtggttcctcctgcggaaggcctacaagaggaacgagctcgccccaaacaagcccgacgagagggagctcgcgagacggcgcgggggctacgctggcgggtacgttaaggaaccagagcggggattgtgggacaacattgtgtatttagacttccgctcgctgtatccttcaatcatcataacccacaacgtctcgccggataccctcaaccgcgagggctgtaaagagtacgacgtcgcccctgaggttggacacaagttctgcaaggacttccccggcttcataccaagcctcctgggagatttgctcgaggagaggcagaagataaagcggaagatgaaggcaacggttgacccgctggagaagaaactcctcgtgtacaggcagtggcttataaaaatcctcgccaacagcttctacggctactacggctacgccaaggcccggtggtactgcaaggagtgcgccgagagcgttacggcctggggaagggagtatatagaaatggttatccgggaactcgaagaaaaattcggttttaaagttctctatgccgatacagacggtctccatgctaccattcccggagcagacgctgaaacagtcaagaaaaaagcaaaggagttcttaaaatacattaatccaaaactgcccggcctgctcgaacttgagtacgagggcttctacgtgaggggcttcttcgtcacgaagaagaagtacgctgtgatagacgaggagggcaagataaccacgaggggtcttgagattgtgaggcgcgactggagcgagatagcgaaggagacccaggccagggtcttagaggcgatactcaagcacggtgacgtcgaggaggccgttaggatagtcaaggaagtgacggaaaagctgagcaagtatgaggtcccgcccgagaagctggtaatccacgagcagataacgcgcgatttgagggattacaaagccaccggcccgcacgttgccgttgcgaagaggctcgcggcgcgtggagtgaaaatccggcccggcacggtgataagctacatcgtcctaaagggctctggaaggataggcgacagggcgattccagctgatgagttcgacccgacgaagcaccgctacgatgcggaatactacatcgagaaccaggttctcccggcggtggagaggattctaaaagccttcggctatcggaaggaggatttgcgctaccagaagacgaagcaggtcggctcgggcgcgtggctgaaggtgaaggggaagaagggtaccgaagcttacgtagaacaaaaactcatctcagaagaggatctgaatagcgccgtcgaccatcatcatcatcatcattga

SEQ ID NO: 124 - protein, 802 aa, Artificial Sequence
  Description of Artificial Sequence:Thermococcus species 9degreesN-7 mutant DNA polymerase, 9degreesN mutant
MILDTDYITENGKPVIRVFKKENGEFKIEYDRTFEPYFYALLKDDSAIEDVKKVTAKRHGTVVKVKRAEKVQKKFLGRPIEVWKLYFNHPQDVPAIRDRIRAHPAVVDIYEYDIPFAKRYLIDKGLIPMEGDEELTMLAFAIATLYHEGEEFGTGPILMISYADGSEARVITWKKIDLPYVDVVSTEKEMIKRFLRVVREKDPDVLITYNGDNFDFAYLKKRCEELGIKFTLGRDGSEPKIQRMGDRFAVEVKGRIHFDLYPVIRRTINLPTYTLEAVYEAVFGKPKEKVYAEEIAQAWESGEGLERVARYSMEDAKVTYELGREFFPMEAQLSRLIGQSLWDVSRSSTGNLVEWFLLRKAYKRNELAPNKPDERELARRRGGYAGGYVKEPERGLWDNIVYLDFRSLYPSIIITHNVSPDTLNREGCKEYDVAPEVGHKFCKDFPGFIPSLLGDLLEERQKIKRKMKATVDPLEKKLLVYRQWLIKILANSFYGYYGYAKARWYCKECAESVTAWGREYIEMVIRELEEKFGFKVLYADTDGLHATIPGADAETVKKKAKEFLKYINPKLPGLLELEYEGFYVRGFFVTKKKYAVIDEEGKITTRGLEIVRRDWSEIAKETQARVLEAILKHGDVEEAVRIVKEVTEKLSKYEVPPEKLVIHEQITRDLRDYKATGPHVAVAKRLAARGVKIRPGTVISYIVLKGSGRIGDRAIPADEFDPTKHRYDAEYYIENQVLPAVERILKAFGYRKEDLRYQKTKQVGSGAWLKVKGKKGTEAYVEQKLISEEDLNSAVDHHHHHH

SEQ ID NO: 125 - DNA, 2409 bp, Artificial Sequence
  Description of Artificial Sequence:Thermococcus species 9degreesN-7 mutant DNA polymerase, 9degreesN mutant
atgattctcgataccgactacatcaccgagaacgggaagcccgtgataagggtcttcaagaaggagaacggcgagtttaaaatcgagtacgacagaaccttcgagccctacttctacgcccttctgaaggacgattctgcgatagaggacgtcaagaaggtaaccgcaaagaggcacggaacggttgtcaaggtgaagcgcgccgagaaggtgcagaagaagttcctcggcaggccgatagaggtctggaagctctacttcaaccatcctcaggacgtcccggcgattcgagacaggatacgcgcccaccccgctgtcgttgacatctacgagtacgacatacccttcgccaagcgctacctcatcgacaagggcctgattccgatggagggcgacgaggagcttacgatgctcgccttcgcgatcgcaaccctctatcacgagggcgaggagttcggaaccgggccgattctcatgataagctacgccgacgggagcgaggcgagggtgataacctggaagaagattgaccttccgtacgttgacgtcgtctcgaccgagaaggagatgattaagcgcttcctccgcgtcgtcagggagaaggaccccgacgtgctcatcacctacaacggcgacaacttcgacttcgcctacctgaagaagcgctgtgaggaactcggaataaagttcacactcggcagggacgggagcgagccgaagatacagcgaatgggcgaccgctttgccgttgaggtgaagggcaggattcacttcgacctctaccccgtcataaggcgcacgataaacctcccgacctacacccttgaggccgtttacgaggccgtctttggaaagcccaaggagaaggtttacgcagaggagatagcgcaggcctgggagagcggggagggccttgaaagggttgcaagatactcgatggaggacgctaaggtgacctacgagctgggaagggagttcttcccgatggaggcccagctttcgaggcttataggccagagcctctgggacgtctcgcgctcgagcaccggaaatttggtggagtggttcctcctgcggaaggcctacaagaggaacgagctcgccccaaacaagcccgacgagagggagctcgcgagacggcgcgggggctacgctggcgggtacgttaaggaaccagagcggggattgtgggacaacattgtgtatttagacttccgctcgctgtatccttcaatcatcataacccacaacgtctcgccggataccctcaaccgcgagggctgtaaagagtacgacgtcgcccctgaggttggacacaagttctgcaaggacttccccggcttcataccaagcctcctgggagatttgctcgaggagaggcagaagataaagcggaagatgaaggcaacggttgacccgctggagaagaaactcctcgattacaggtattggcttataaaaatcctcgccaacagcttctacggctactacggctacgccaaggcccggtggtactgcaaggagtgcgccgagagcgttacggcctggggaagggagtatatagaaatggttatccgggaactcgaagaaaaattcggttttaaagttctctatgccgatacagacggtctccatgctaccattcccggagcagacgctgaaacagtcaagaaaaaagcaaaggagttcttaaaatacattaatccaaaactgcccggcctgctcgaacttgagtacgagggcttctacgtgaggggcttcttcgtcacgaagaagaagtacgctgtgatagacgaggagggcaagataaccacgaggggtcttgagattgtgaggcgcgactggagcgagatagcgaaggagacccaggccagggtcttagaggcgatactcaagcacggtgacgtcgaggaggccgttaggatagtcaaggaagtgacggaaaagctgagcaagtatgaggtcccgcccgagaagctggtaatccacgagcagataacgcgcgatttgagggattacaaagccaccggcccgcacgttgccgttgcgaagaggctcgcggcgcgtggagtgaaaatccggcccggcacggtgataagctacatcgtcctaaagggctctggaaggataggcgacagggcgattccagctgatgagttcgacccgacgaagcaccgctacgatgcggaatactacatcgagaaccaggttctcccggcggtggagaggattctaaaagccttcggctatcggaaggaggatttgcgctaccagaagacgaagcaggtcggctcgggcgcgtggctgaaggtgaaggggaagaagggtaccgaagcttacgtagaacaaaaactcatctcagaagaggatctgaatagcgccgtcgaccatcatcatcatcatcattga

SEQ ID NO: 126 - protein, 802 aa, Artificial Sequence
  Description of Artificial Sequence:Thermococcus species 9degreesN-7 mutant DNA polymerase, 9degreesN mutant
MILDTDYITENGKPVIRVFKKENGEFKIEYDRTFEPYFYALLKDDSAIEDVKKVTAKRHGTVVKVKRAEKVQKKFLGRPIEVWKLYFNHPQDVPAIRDRIRAHPAVVDIYEYDIPFAKRYLIDKGLIPMEGDEELTMLAFAIATLYHEGEEFGTGPILMISYADGSEARVITWKKIDLPYVDVVSTEKEMIKRFLRVVREKDPDVLITYNGDNFDFAYLKKRCEELGIKFTLGRDGSEPKIQRMGDRFAVEVKGRIHFDLYPVIRRTINLPTYTLEAVYEAVFGKPKEKVYAEEIAQAWESGEGLERVARYSMEDAKVTYELGREFFPMEAQLSRLIGQSLWDVSRSSTGNLVEWFLLRKAYKRNELAPNKPDERELARRRGGYAGGYVKEPERGLWDNIVYLDFRSLYPSIIITHNVSPDTLNREGCKEYDVAPEVGHKFCKDFPGFIPSLLGDLLEERQKIKRKMKATVDPLEKKLLDYRYWLIKILANSFYGYYGYAKARWYCKECAESVTAWGREYIEMVIRELEEKFGFKVLYADTDGLHATIPGADAETVKKKAKEFLKYINPKLPGLLELEYEGFYVRGFFVTKKKYAVIDEEGKITTRGLEIVRRDWSEIAKETQARVLEAILKHGDVEEAVRIVKEVTEKLSKYEVPPEKLVIHEQITRDLRDYKATGPHVAVAKRLAARGVKIRPGTVISYIVLKGSGRIGDRAIPADEFDPTKHRYDAEYYIENQVLPAVERILKAFGYRKEDLRYQKTKQVGSGAWLKVKGKKGTEAYVEQKLISEEDLNSAVDHHHHHH

SEQ ID NO: 127 - DNA, 2409 bp, Artificial Sequence
  Description of Artificial Sequence:Thermococcus species 9degreesN-7 mutant DNA polymerase, 9degreesN mutant
atgattctcgataccgactacatcaccgagaacgggaagcccgtgataagggtcttcaagaaggagaacggcgagtttaaaatcgagtacgacagaaccttcgagccctacttctacgcccttctgaaggacgattctgcgatagaggacgtcaagaaggtaaccgcaaagaggcacggaacggttgtcaaggtgaagcgcgccgagaaggtgcagaagaagttcctcggcaggccgatagaggtctggaagctctacttcaaccatcctcaggacgtcccggcgattcgagacaggatacgcgcccaccccgctgtcgttgacatctacgagtacgacatacccttcgccaagcgctacctcatcgacaagggcctgattccgatggagggcgacgaggagcttacgatgctcgccttcgcgatcgcaaccctctatcacgagggcgaggagttcggaaccgggccgattctcatgataagctacgccgacgggagcgaggcgagggtgataacctggaagaagattgaccttccgtacgttgacgtcgtctcgaccgagaaggagatgattaagcgcttcctccgcgtcgtcagggagaaggaccccgacgtgctcatcacctacaacggcgacaacttcgacttcgcctacctgaagaagcgctgtgaggaactcggaataaagttcacactcggcagggacgggagcgagccgaagatacagcgaatgggcgaccgctttgccgttgaggtgaagggcaggattcacttcgacctctaccccgtcataaggcgcacgataaacctcccgacctacacccttgaggccgtttacgaggccgtctttggaaagcccaaggagaaggtttacgcagaggagatagcgcaggcctgggagagcggggagggccttgaaagggttgcaagatactcgatggaggacgctaaggtgacctacgagctgggaagggagttcttcccgacagaggcccagctttcgaggcttataggccagagcctctgggacgtctcgcgctcgagcaccggaaatttggtggagtggttcctcctgcggaaggcctacaagaggaacgagctcgccccaaacaagcccgacgagagggagctcgcgagacggcgcgggggctacgctggcgggtacgttaaggaaccagagcggggattgtgggacaacattgtgtatttagacttccgctcgctgtatccttcaatcatcataacccacaacgtctcgccggataccctcaaccgcgagggctgtaaagagtacgacgtcgcccctgaggttggacacaagttctgcaaggacttccccggcttcataccaagcctcctgggagatttgctcgaggagaggcagaagataaagcggaagatgaaggcaacggttgacccgctggagaagaaactcctcgattacaggcagaggcttataaaaatcctcgccaacagcttctacggctactacggctacgccaaggcccggtggtactgcaaggagtgcgccgagagcgttacggcctggggaagggagtatatagaaatggttatccgggaactcgaagaaaaattcggttttaaagttctctatgccgatacagacggtctccatgctaccattcccggagcagacgctgaaacagtcaagaaaaaagcaaaggagttcttaaaatacattaatccaaaactgcccggcctgctcgaacttgagtacgagggcttctacgtgaggggcttcttcgtcacgaagaagaagtacgctgtgatagacgaggagggcaagataaccacgaggggtcttgagattgtgaggcgcgactggagcgagatagcgaaggagacccaggccagggtcttagaggcgatactcaagcacggtgacgtcgaggaggccgttaggatagtcaaggaagtgacggaaaagctgagcaagtatgaggtcccgcccgagaagctggtaatccacgagcagataacgcgcgatttgagggattacaaagccaccggcccgcacgttgccgttgcgaagaggctcgcggcgcgtggagtgaaaatccggcccggcacggtgataagctacatcgtcctaaagggctctggaaggataggcgacagggcgattccagctgatgagttcgacccgacgaagcaccgctacgatgcggaatactacatcgagaaccaggttctcccggcggtggagaggattctaaaagccttcggctatcggaaggaggatttgcgctaccagaagacgaagcaggtcggctcgggcgcgtggctgaaggtgaaggggaagaagggtaccgaagcttacgtagaacaaaaactcatctcagaagaggatctgaatagcgccgtcgaccatcatcatcatcatcattga

SEQ ID NO: 128 - protein, 802 aa, Artificial Sequence
  Description of Artificial Sequence:Thermococcus species 9degreesN-7 mutant DNA polymerase, 9degreesN mutant
MILDTDYITENGKPVIRVFKKENGEFKIEYDRTFEPYFYALLKDDSAIEDVKKVTAKRHGTVVKVKRAEKVQKKFLGRPIEVWKLYFNHPQDVPAIRDRIRAHPAVVDIYEYDIPFAKRYLIDKGLIPMEGDEELTMLAFAIATLYHEGEEFGTGPILMISYADGSEARVITWKKIDLPYVDVVSTEKEMIKRFLRVVREKDPDVLITYNGDNFDFAYLKKRCEELGIKFTLGRDGSEPKIQRMGDRFAVEVKGRIHFDLYPVIRRTINLPTYTLEAVYEAVFGKPKEKVYAEEIAQAWESGEGLERVARYSMEDAKVTYELGREFFPTEAQLSRLIGQSLWDVSRSSTGNLVEWFLLRKAYKRNELAPNKPDERELARRRGGYAGGYVKEPERGLWDNIVYLDFRSLYPSIIITHNVSPDTLNREGCKEYDVAPEVGHKFCKDFPGFIPSLLGDLLEERQKIKRKMKATVDPLEKKLLDYRQRLIKILANSFYGYYGYAKARWYCKECAESVTAWGREYIEMVIRELEEKFGFKVLYADTDGLHATIPGADAETVKKKAKEFLKYINPKLPGLLELEYEGFYVRGFFVTKKKYAVIDEEGKITTRGLEIVRRDWSEIAKETQARVLEAILKHGDVEEAVRIVKEVTEKLSKYEVPPEKLVIHEQITRDLRDYKATGPHVAVAKRLAARGVKIRPGTVISYIVLKGSGRIGDRAIPADEFDPTKHRYDAEYYIENQVLPAVERILKAFGYRKEDLRYQKTKQVGSGAWLKVKGKKGTEAYVEQKLISEEDLNSAVDHHHHHH

SEQ ID NO: 129 - DNA, 2409 bp, Artificial Sequence
  Description of Artificial Sequence:Thermococcus species 9degreesN-7 mutant DNA polymerase, 9degreesN mutant
atgattctcgataccgactacatcaccgagaacgggaagcccgtgataagggtcttcaagaaggagaacggcgagtttaaaatcgagtacgacagaaccttcgagccctacttctacgcccttctgaaggacgattctgcgatagaggacgtcaagaaggtaaccgcaaagaggcacggaacggttgtcaaggtgaagcgcgccgagaaggtgcagaagaagttcctcggcaggccgatagaggtctggaagctctacttcaaccatcctcaggacgtcccggcgattcgagacaggatacgcgcccaccccgctgtcgttgacatctacgagtacgacatacccttcgccaagcgctacctcatcgacaagggcctgattccgatggagggcgacgaggagcttacgatgctcgccttcgcgatcgcaaccctctatcacgagggcgaggagttcggaaccgggccgattctcatgataagctacgccgacgggagcgaggcgagggtgataacctggaagaagattgaccttccgtacgttgacgtcgtctcgaccgagaaggagatgattaagcgcttcctccgcgtcgtcagggagaaggaccccgacgtgctcatcacctacaacggcgacaacttcgacttcgcctacctgaagaagcgctgtgaggaactcggaataaagttcacactcggcagggacgggagcgagccgaagatacagcgaatgggcgaccgctttgccgttgaggtgaagggcaggattcacttcgacctctaccccgtcataaggcgcacgataaacctcccgacctacacccttgaggccgtttacgaggccgtctttggaaagcccaaggagaaggtttacgcagaggagatagcgcaggcctgggagagcggggagggccttgaaagggttgcaagatactcgatggaggacgctaaggtgacctacgagctgggaagggagttcttcccgcccgaggcccagctttcgaggcttataggccagagcctctgggacgtctcgcgctcgagcaccggaaatttggtggagtggttcctcctgcggaaggcctacaagaggaacgagctcgccccaaacaagcccgacgagagggagctcgcgagacggcgcgggggctacgctggcgggtacgttaaggaaccagagcggggattgtgggacaacattgtgtatttagacttccgctcgctgtatccttcaatcatcataacccacaacgtctcgccggataccctcaaccgcgagggctgtaaagagtacgacgtcgcccctgaggttggacacaagttctgcaaggacttccccggcttcataccaagcctcctgggagatttgctcgaggagaggcagaagataaagcggaagatgaaggcaacggttgacccgctggagaagaaactcctcgattacaggcagaggcttataaaaatcctcgccaacagcttctacggctactacggctacgccaaggcccggtggtactgcaaggagtgcgccgagagcgttacggcctggggaagggagtatatagaaatggttatccgggaactcgaagaaaaattcggttttaaagttctctatgccgatacagacggtctccatgctaccattcccggagcagacgctgaaacagtcaagaaaaaagcaaaggagttcttaaaatacattaatccaaaactgcccggcctgctcgaacttgagtacgagggcttctacgtgaggggcttcttcgtcacgaagaagaagtacgctgtgatagacgaggagggcaagataaccacgaggggtcttgagattgtgaggcgcgactggagcgagatagcgaaggagacccaggccagggtcttagaggcgatactcaagcacggtgacgtcgaggaggccgttaggatagtcaaggaagtgacggaaaagctgagcaagtatgaggtcccgcccgagaagctggtaatccacgagcagataacgcgcgatttgagggattacaaagccaccggcccgcacgttgccgttgcgaagaggctcgcggcgcgtggagtgaaaatccggcccggcacggtgataagctacatcgtcctaaagggctctggaaggataggcgacagggcgattccagctgatgagttcgacccgacgaagcaccgctacgatgcggaatactacatcgagaaccaggttctcccggcggtggagaggattctaaaagccttcggctatcggaaggaggatttgcgctaccagaagacgaagcaggtcggctcgggcgcgtggctgaaggtgaaggggaagaagggtaccgaagcttacgtagaacaaaaactcatctcagaagaggatctgaatagcgccgtcgaccatcatcatcatcatcattga

SEQ ID NO: 130 - protein, 802 aa, Artificial Sequence
  Description of Artificial Sequence:Thermococcus species 9degreesN-7 mutant DNA polymerase, 9degreesN mutant
MILDTDYITENGKPVIRVFKKENGEFKIEYDRTFEPYFYALLKDDSAIEDVKKVTAKRHGTVVKVKRAEKVQKKFLGRPIEVWKLYFNHPQDVPAIRDRIRAHPAVVDIYEYDIPFAKRYLIDKGLIPMEGDEELTMLAFAIATLYHEGEEFGTGPILMISYADGSEARVITWKKIDLPYVDVVSTEKEMIKRFLRVVREKDPDVLITYNGDNFDFAYLKKRCEELGIKFTLGRDGSEPKIQRMGDRFAVEVKGRIHFDLYPVIRRTINLPTYTLEAVYEAVFGKPKEKVYAEEIAQAWESGEGLERVARYSMEDAKVTYELGREFFPPEAQLSRLIGQSLWDVSRSSTGNLVEWFLLRKAYKRNELAPNKPDERELARRRGGYAGGYVKEPERGLWDNIVYLDFRSLYPSIIITHNVSPDTLNREGCKEYDVAPEVGHKFCKDFPGFIPSLLGDLLEERQKIKRKMKATVDPLEKKLLDYRQRLIKILANSFYGYYGYAKARWYCKECAESVTAWGREYIEMVIRELEEKFGFKVLYADTDGLHATIPGADAETVKKKAKEFLKYINPKLPGLLELEYEGFYVRGFFVTKKKYAVIDEEGKITTRGLEIVRRDWSEIAKETQARVLEAILKHGDVEEAVRIVKEVTEKLSKYEVPPEKLVIHEQITRDLRDYKATGPHVAVAKRLAARGVKIRPGTVISYIVLKGSGRIGDRAIPADEFDPTKHRYDAEYYIENQVLPAVERILKAFGYRKEDLRYQKTKQVGSGAWLKVKGKKGTEAYVEQKLISEEDLNSAVDHHHHHH

SEQ ID NO: 131 - DNA, 2409 bp, Artificial Sequence
  Description of Artificial Sequence:Thermococcus species 9degreesN-7 mutant DNA polymerase, 9degreesN mutant
atgattctcgataccgactacatcaccgagaacgggaagcccgtgataagggtcttcaagaaggagaacggcgagtttaaaatcgagtacgacagaaccttcgagccctacttctacgcccttctgaaggacgattctgcgatagaggacgtcaagaaggtaaccgcaaagaggcacggaacggttgtcaaggtgaagcgcgccgagaaggtgcagaagaagttcctcggcaggccgatagaggtctggaagctctacttcaaccatcctcaggacgtcccggcgattcgagacaggatacgcgcccaccccgctgtcgttgacatctacgagtacgacatacccttcgccaagcgctacctcatcgacaagggcctgattccgatggagggcgacgaggagcttacgatgctcgccttcgcgatcgcaaccctctatcacgagggcgaggagttcggaaccgggccgattctcatgataagctacgccgacgggagcgaggcgagggtgataacctggaagaagattgaccttccgtacgttgacgtcgtctcgaccgagaaggagatgattaagcgcttcctccgcgtcgtcagggagaaggaccccgacgtgctcatcacctacaacggcgacaacttcgacttcgcctacctgaagaagcgctgtgaggaactcggaataaagttcacactcggcagggacgggagcgagccgaagatacagcgaatgggcgaccgctttgccgttgaggtgaagggcaggattcacttcgacctctaccccgtcataaggcgcacgataaacctcccgacctacacccttgaggccgtttacgaggccgtctttggaaagcccaaggagaaggtttacgcagaggagatagcgcaggcctgggagagcggggagggccttgaaagggttgcaagatactcgatggaggacgctaaggtgacctacgagctgggaagggagttcttcccgagcgaggcccagctttcgaggcttataggccagagcctctgggacgtctcgcgctcgagcaccggaaatttggtggagtggttcctcctgcggaaggcctacaagaggaacgagctcgccccaaacaagcccgacgagagggagctcgcgagacggcgcgggggctacgctggcgggtacgttaaggaaccagagcggggattgtgggacaacattgtgtatttagacttccgctcgctgtatccttcaatcatcataacccacaacgtctcgccggataccctcaaccgcgagggctgtaaagagtacgacgtcgcccctgaggttggacacaagttctgcaaggacttccccggcttcataccaagcctcctgggagatttgctcgaggagaggcagaagataaagcggaagatgaaggcaacggttgacccgctggagaagaaactcctcgattacaggcagaggcttataaaaatcctcgccaacagcttctacggctactacggctacgccaaggcccggtggtactgcaaggagtgcgccgagagcgttacggcctggggaagggagtatatagaaatggttatccgggaactcgaagaaaaattcggttttaaagttctctatgccgatacagacggtctccatgctaccattcccggagcagacgctgaaacagtcaagaaaaaagcaaaggagttcttaaaatacattaatccaaaactgcccggcctgctcgaacttgagtacgagggcttctacgtgaggggcttcttcgtcacgaagaagaagtacgctgtgatagacgaggagggcaagataaccacgaggggtcttgagattgtgaggcgcgactggagcgagatagcgaaggagacccaggccagggtcttagaggcgatactcaagcacggtgacgtcgaggaggccgttaggatagtcaaggaagtgacggaaaagctgagcaagtatgaggtcccgcccgagaagctggtaatccacgagcagataacgcgcgatttgagggattacaaagccaccggcccgcacgttgccgttgcgaagaggctcgcggcgcgtggagtgaaaatccggcccggcacggtgataagctacatcgtcctaaagggctctggaaggataggcgacagggcgattccagctgatgagttcgacccgacgaagcaccgctacgatgcggaatactacatcgagaaccaggttctcccggcggtggagaggattctaaaagccttcggctatcggaaggaggatttgcgctaccagaagacgaagcaggtcggctcgggcgcgtggctgaaggtgaaggggaagaagggtaccgaagcttacgtagaacaaaaactcatctcagaagaggatctgaatagcgccgtcgaccatcatcatcatcatcattga

SEQ ID NO: 132 - protein, 802 aa, Artificial Sequence
  Description of Artificial Sequence:Thermococcus species 9degreesN-7 mutant DNA polymerase, 9degreesN mutant
MILDTDYITENGKPVIRVFKKENGEFKIEYDRTFEPYFYALLKDDSAIEDVKKVTAKRHGTVVKVKRAEKVQKKFLGRPIEVWKLYFNHPQDVPAIRDRIRAHPAVVDIYEYDIPFAKRYLIDKGLIPMEGDEELTMLAFAIATLYHEGEEFGTGPILMISYADGSEARVITWKKIDLPYVDVVSTEKEMIKRFLRVVREKDPDVLITYNGDNFDFAYLKKRCEELGIKFTLGRDGSEPKIQRMGDRFAVEVKGRIHFDLYPVIRRTINLPTYTLEAVYEAVFGKPKEKVYAEEIAQAWESGEGLERVARYSMEDAKVTYELGREFFPSEAQLSRLIGQSLWDVSRSSTGNLVEWFLLRKAYKRNELAPNKPDERELARRRGGYAGGYVKEPERGLWDNIVYLDFRSLYPSIIITHNVSPDTLNREGCKEYDVAPEVGHKFCKDFPGFIPSLLGDLLEERQKIKRKMKATVDPLEKKLLDYRQRLIKILANSFYGYYGYAKARWYCKECAESVTAWGREYIEMVIRELEEKFGFKVLYADTDGLHATIPGADAETVKKKAKEFLKYINPKLPGLLELEYEGFYVRGFFVTKKKYAVIDEEGKITTRGLEIVRRDWSEIAKETQARVLEAILKHGDVEEAVRIVKEVTEKLSKYEVPPEKLVIHEQITRDLRDYKATGPHVAVAKRLAARGVKIRPGTVISYIVLKGSGRIGDRAIPADEFDPTKHRYDAEYYIENQVLPAVERILKAFGYRKEDLRYQKTKQVGSGAWLKVKGKKGTEAYVEQKLISEEDLNSAVDHHHHHH

SEQ ID NO: 133 - DNA, 2409 bp, Artificial Sequence
  Description of Artificial Sequence:Thermococcus species 9degreesN-7 mutant DNA polymerase, 9degreesN mutant
atgattctcgataccgactacatcaccgagaacgggaagcccgtgataagggtcttcaagaaggagaacggcgagtttaaaatcgagtacgacagaaccttcgagccctacttctacgcccttctgaaggacgattctgcgatagaggacgtcaagaaggtaaccgcaaagaggcacggaacggttgtcaaggtgaagcgcgccgagaaggtgcagaagaagttcctcggcaggccgatagaggtctggaagctctacttcaaccatcctcaggacgtcccggcgattcgagacaggatacgcgcccaccccgctgtcgttgacatctacgagtacgacatacccttcgccaagcgctacctcatcgacaagggcctgattccgatggagggcgacgaggagcttacgatgctcgccttcgcgatcgcaaccctctatcacgagggcgaggagttcggaaccgggccgattctcatgataagctacgccgacgggagcgaggcgagggtgataacctggaagaagattgaccttccgtacgttgacgtcgtctcgaccgagaaggagatgattaagcgcttcctccgcgtcgtcagggagaaggaccccgacgtgctcatcacctacaacggcgacaacttcgacttcgcctacctgaagaagcgctgtgaggaactcggaataaagttcacactcggcagggacgggagcgagccgaagatacagcgaatgggcgaccgctttgccgttgaggtgaagggcaggattcacttcgacctctaccccgtcataaggcgcacgataaacctcccgacctacacccttgaggccgtttacgaggccgtctttggaaagcccaaggagaaggtttacgcagaggagatagcgcaggcctgggagagcggggagggccttgaaagggttgcaagatactcgatggaggacgctaaggtgacctacgagctgggaagggagttcttcccgacggaggcccagcgttcgaggcttataggccagagcctctgggacgtctcgcgctcgagcaccggaaatttggtggagtggttcctcctgcggaaggcctacaagaggaacgagctcgccccaaacaagcccgacgagagggagctcgcgagacggcgcgggggctacgctggcgggtacgttaaggaaccagagcggggattgtgggacaacattgtgtatttagacttccgctcgctgtatccttcaatcatcataacccacaacgtctcgccggataccctcaaccgcgagggctgtaaagagtacgacgtcgcccctgaggttggacacaagttctgcaaggacttccccggcttcataccaagcctcctgggagatttgctcgaggagaggcagaagataaagcggaagatgaaggcaacggttgacccgctggagaagaaactcctcgattacaggcagagggcgatcaagatcctcgccaacagcttctacggctactacggctacgccaaggcccggtggtactgcaaggagtgcgccgagagcgttacggcctggggaagggagtatatagaaatggttatccgggaactcgaagaaaaattcggttttaaagttctctatgccgatacagacggtctccatgctaccattcccggagcagacgctgaaacagtcaagaaaaaagcaaaggagttcttaaaatacattaatccaaaactgcccggcctgctcgaacttgagtacgagggcttctacgtgaggggcttcttcgtcacgaagaagaagtacgctgtgatagacgaggagggcaagataaccacgaggggtcttgagattgtgaggcgcgactggagcgagatagcgaaggagacccaggccagggtcttagaggcgatactcaagcacggtgacgtcgaggaggccgttaggatagtcaaggaagtgacggaaaagctgagcaagtatgaggtcccgcccgagaagctggtaatccacgagcagataacgcgcgatttgagggattacaaagccaccggcccgcacgttgccgttgcgaagaggctcgcggcgcgtggagtgaaaatccggcccggcacggtgataagctacatcgtcctaaagggctctggaaggataggcgacagggcgattccagctgatgagttcgacccgacgaagcaccgctacgatgcggaatactacatcgagaaccaggttctcccggcggtggagaggattctaaaagccttcggctatcggaaggaggatttgcgctaccagaagacgaagcaggtcggctcgggcgcgtggctgaaggtgaaggggaagaagggtaccgaagcttacgtagaacaaaaactcatctcagaagaggatctgaatagcgccgtcgaccatcatcatcatcatcattga

SEQ ID NO: 134 - protein, 802 aa, Artificial Sequence
  Description of Artificial Sequence:Thermococcus species 9degreesN-7 mutant DNA polymerase, 9degreesN mutant
MILDTDYITENGKPVIRVFKKENGEFKIEYDRTFEPYFYALLKDDSAIEDVKKVTAKRHGTVVKVKRAEKVQKKFLGRPIEVWKLYFNHPQDVPAIRDRIRAHPAVVDIYEYDIPFAKRYLIDKGLIPMEGDEELTMLAFAIATLYHEGEEFGTGPILMISYADGSEARVITWKKIDLPYVDVVSTEKEMIKRFLRVVREKDPDVLITYNGDNFDFAYLKKRCEELGIKFTLGRDGSEPKIQRMGDRFAVEVKGRIHFDLYPVIRRTINLPTYTLEAVYEAVFGKPKEKVYAEEIAQAWESGEGLERVARYSMEDAKVTYELGREFFPTEAQRSRLIGQSLWDVSRSSTGNLVEWFLLRKAYKRNELAPNKPDERELARRRGGYAGGYVKEPERGLWDNIVYLDFRSLYPSIIITHNVSPDTLNREGCKEYDVAPEVGHKFCKDFPGFIPSLLGDLLEERQKIKRKMKATVDPLEKKLLDYRQRAIKILANSFYGYYGYAKARWYCKECAESVTAWGREYIEMVIRELEEKFGFKVLYADTDGLHATIPGADAETVKKKAKEFLKYINPKLPGLLELEYEGFYVRGFFVTKKKYAVIDEEGKITTRGLEIVRRDWSEIAKETQARVLEAILKHGDVEEAVRIVKEVTEKLSKYEVPPEKLVIHEQITRDLRDYKATGPHVAVAKRLAARGVKIRPGTVISYIVLKGSGRIGDRAIPADEFDPTKHRYDAEYYIENQVLPAVERILKAFGYRKEDLRYQKTKQVGSGAWLKVKGKKGTEAYVEQKLISEEDLNSAVDHHHHHH

SEQ ID NO: 135 - DNA, 2409 bp, Artificial Sequence
  Description of Artificial Sequence:Thermococcus species 9degreesN-7 mutant DNA polymerase, 9degreesN mutant
atgattctcgataccgactacatcaccgagaacgggaagcccgtgataagggtcttcaagaaggagaacggcgagtttaaaatcgagtacgacagaaccttcgagccctacttctacgcccttctgaaggacgattctgcgatagaggacgtcaagaaggtaaccgcaaagaggcacggaacggttgtcaaggtgaagcgcgccgagaaggtgcagaagaagttcctcggcaggccgatagaggtctggaagctctacttcaaccatcctcaggacgtcccggcgattcgagacaggatacgcgcccaccccgctgtcgttgacatctacgagtacgacatacccttcgccaagcgctacctcatcgacaagggcctgattccgatggagggcgacgaggagcttacgatgctcgccttcgcgatcgcaaccctctatcacgagggcgaggagttcggaaccgggccgattctcatgataagctacgccgacgggagcgaggcgagggtgataacctggaagaagattgaccttccgtacgttgacgtcgtctcgaccgagaaggagatgattaagcgcttcctccgcgtcgtcagggagaaggaccccgacgtgctcatcacctacaacggcgacaacttcgacttcgcctacctgaagaagcgctgtgaggaactcggaataaagttcacactcggcagggacgggagcgagccgaagatacagcgaatgggcgaccgctttgccgttgaggtgaagggcaggattcacttcgacctctaccccgtcataaggcgcacgataaacctcccgacctacacccttgaggccgtttacgaggccgtctttggaaagcccaaggagaaggtttacgcagaggagatagcgcaggcctgggagagcggggagggccttgaaagggttgcaagatactcgatggaggacgctaaggtgacctacgagctgggaagggagttcttcccgacggaggcccagcgctcgaggcttataggccagagcctctgggacgtctcgcgctcgagcaccggaaatttggtggagtggttcctcctgcggaaggcctacaagaggaacgagctcgccccaaacaagcccgacgagagggagctcgcgagacggcgcgggggctacgctggcgggtacgttaaggaaccagagcggggattgtgggacaacattgtgtatttagacttccgctcgctgtatccttcaatcatcataacccacaacgtctcgccggataccctcaaccgcgagggctgtaaagagtacgacgtcgcccctgaggttggacacaagttctgcaaggacttccccggcttcataccaagcctcctgggagatttgctcgaggagaggcagaagataaagcggaagatgaaggcaacggttgacccgctggagaagaaactcctcgattacaggcagaggcttataaaaatcctcgccaacagcttctacggctactacggctacgccaaggcccggtggtactgcaaggagtgcgccgagagcgttacggcctggggaagggagtatatagaaatggttatccgggaactcgaagaaaaattcggttttaaagttctctatgccgatacagacggtctccatgctaccattcccggagcagacgctgaaacagtcaagaaaaaagcaaaggagttcttaaaatacattaatccaaaactgcccggcctgctcgaacttgagtacgagggcttctacgtgaggggcttcttcgtcacgaagaagaagtacgctgtgatagacgaggagggcaagataaccacgaggggtcttgagattgtgaggcgcgactggagcgagatagcgaaggagacccaggccagggtcttagaggcgatactcaagcacggtgacgtcgaggaggccgttaggatagtcaaggaagtgacggaaaagctgagcaagtatgaggtcccgcccgagaagctggtaatccacgagcagataacgcgcgatttgagggattacaaagccaccggcccgcacgttgccgttgcgaagaggctcgcggcgcgtggagtgaaaatccggcccggcacggtgataagctacatcgtcctaaagggctctggaaggataggcgacagggcgattccagctgatgagttcgacccgacgaagcaccgctacgatgcggaatactacatcgagaaccaggttctcccggcggtggagaggattctaaaagccttcggctatcggaaggaggatttgcgctaccagaagacgaagcaggtcggctcgggcgcgtggctgaaggtgaaggggaagaagggtaccgaagcttacgtagaacaaaaactcatctcagaagaggatctgaatagcgccgtcgaccatcatcatcatcatcattga

SEQ ID NO: 136 - protein, 802 aa, Artificial Sequence
  Description of Artificial Sequence:Thermococcus species 9degreesN-7 mutant DNA polymerase, 9degreesN mutant
MILDTDYITENGKPVIRVFKKENGEFKIEYDRTFEPYFYALLKDDSAIEDVKKVTAKRHGTVVKVKRAEKVQKKFLGRPIEVWKLYFNHPQDVPAIRDRIRAHPAVVDIYEYDIPFAKRYLIDKGLIPMEGDEELTMLAFAIATLYHEGEEFGTGPILMISYADGSEARVITWKKIDLPYVDVVSTEKEMIKRFLRVVREKDPDVLITYNGDNFDFAYLKKRCEELGIKFTLGRDGSEPKIQRMGDRFAVEVKGRIHFDLYPVIRRTINLPTYTLEAVYEAVFGKPKEKVYAEEIAQAWESGEGLERVARYSMEDAKVTYELGREFFPTEAQRSRLIGQSLWDVSRSSTGNLVEWFLLRKAYKRNELAPNKPDERELARRRGGYAGGYVKEPERGLWDNIVYLDFRSLYPSIIITHNVSPDTLNREGCKEYDVAPEVGHKFCKDFPGFIPSLLGDLLEERQKIKRKMKATVDPLEKKLLDYRQRLIKILANSFYGYYGYAKARWYCKECAESVTAWGREYIEMVIRELEEKFGFKVLYADTDGLHATIPGADAETVKKKAKEFLKYINPKLPGLLELEYEGFYVRGFFVTKKKYAVIDEEGKITTRGLEIVRRDWSEIAKETQARVLEAILKHGDVEEAVRIVKEVTEKLSKYEVPPEKLVIHEQITRDLRDYKATGPHVAVAKRLAARGVKIRPGTVISYIVLKGSGRIGDRAIPADEFDPTKHRYDAEYYIENQVLPAVERILKAFGYRKEDLRYQKTKQVGSGAWLKVKGKKGTEAYVEQKLISEEDLNSAVDHHHHHH

SEQ ID NO: 137 - DNA, 2409 bp, Artificial Sequence
  Description of Artificial Sequence:Thermococcus species 9degreesN-7 mutant DNA polymerase, 9degreesN mutant
atgattctcgataccgactacatcaccgagaacgggaagcccgtgataagggtcttcaagaaggagaacggcgagtttaaaatcgagtacgacagaaccttcgagccctacttctacgcccttctgaaggacgattctgcgatagaggacgtcaagaaggtaaccgcaaagaggcacggaacggttgtcaaggtgaagcgcgccgagaaggtgcagaagaagttcctcggcaggccgatagaggtctggaagctctacttcaaccatcctcaggacgtcccggcgattcgagacaggatacgcgcccaccccgctgtcgttgacatctacgagtacgacatacccttcgccaagcgctacctcatcgacaagggcctgattccgatggagggcgacgaggagcttacgatgctcgccttcgcgatcgcaaccctctatcacgagggcgaggagttcggaaccgggccgattctcatgataagctacgccgacgggagcgaggcgagggtgataacctggaagaagattgaccttccgtacgttgacgtcgtctcgaccgagaaggagatgattaagcgcttcctccgcgtcgtcagggagaaggaccccgacgtgctcatcacctacaacggcgacaacttcgacttcgcctacctgaagaagcgctgtgaggaactcggaataaagttcacactcggcagggacgggagcgagccgaagatacagcgaatgggcgaccgctttgccgttgaggtgaagggcaggattcacttcgacctctaccccgtcataaggcgcacgataaacctcccgacctacacccttgaggccgtttacgaggccgtctttggaaagcccaaggagaaggtttacgcagaggagatagcgcaggcctgggagagcggggagggccttgaaagggttgcaagatactcgatggaggacgctaaggtgacctacgagctgggaagggagttcttcccgatggaggcctttctttcgaggcttataggccagagcctctgggacgtctcgcgctcgagcaccggaaatttggtggagtggttcctcctgcggaaggcctacaagaggaacgagctcgccccaaacaagcccgacgagagggagctcgcgagacggcgcgggggctacgctggcgggtacgttaaggaaccagagcggggattgtgggacaacattgtgtatttagacttccgctcgctgtatccttcaatcatcataacccacaacgtctcgccggataccctcaaccgcgagggctgtaaagagtacgacgtcgcccctgaggttggacacaagttctgcaaggacttccccggcttcataccaagcctcctgggagatttgctcgaggagaggcagaagataaagcggaagatgaaggcaacggttgacccgctggagaagaaactcctcgattacaggcagaggcttataaaaatcctcgccaacagcttctacggctactacggctacgccaaggcccggtggtactgcaaggagtgcgccgagagcgttacggcctggggaagggagtatatagaaatggttatccgggaactcgaagaaaaattcggttttaaagttctctatgccgatacagacggtctccatgctaccattcccggagcagacgctgaaacagtcaagaaaaaagcaaaggagttcttaaaatacattaatccaaaactgcccggcctgctcgaacttgagtacgagggcttctacgtgaggggcttcttcgtcacgaagaagaagtacgctgtgatagacgaggagggcaagataaccacgaggggtcttgagattgtgaggcgcgactggagcgagatagcgaaggagacccaggccagggtcttagaggcgatactcaagcacggtgacgtcgaggaggccgttaggatagtcaaggaagtgacggaaaagctgagcaagtatgaggtcccgcccgagaagctggtaatccacgagcagataacgcgcgatttgagggattacaaagccaccggcccgcacgttgccgttgcgaagaggctcgcggcgcgtggagtgaaaatccggcccggcacggtgataagctacatcgtcctaaagggctctggaaggataggcgacagggcgattccagctgatgagttcgacccgacgaagcaccgctacgatgcggaatactacatcgagaaccaggttctcccggcggtggagaggattctaaaagccttcggctatcggaaggaggatttgcgctaccagaagacgaagcaggtcggctcgggcgcgtggctgaaggtgaaggggaagaagggtaccgaagcttacgtagaacaaaaactcatctcagaagaggatctgaatagcgccgtcgaccatcatcatcatcatcattga

SEQ ID NO: 138 - protein, 802 aa, Artificial Sequence
  Description of Artificial Sequence:Thermococcus species 9degreesN-7 mutant DNA polymerase, 9degreesN mutant
MILDTDYITENGKPVIRVFKKENGEFKIEYDRTFEPYFYALLKDDSAIEDVKKVTAKRHGTVVKVKRAEKVQKKFLGRPIEVWKLYFNHPQDVPAIRDRIRAHPAVVDIYEYDIPFAKRYLIDKGLIPMEGDEELTMLAFAIATLYHEGEEFGTGPILMISYADGSEARVITWKKIDLPYVDVVSTEKEMIKRFLRVVREKDPDVLITYNGDNFDFAYLKKRCEELGIKFTLGRDGSEPKIQRMGDRFAVEVKGRIHFDLYPVIRRTINLPTYTLEAVYEAVFGKPKEKVYAEEIAQAWESGEGLERVARYSMEDAKVTYELGREFFPMEAFLSRLIGQSLWDVSRSSTGNLVEWFLLRKAYKRNELAPNKPDERELARRRGGYAGGYVKEPERGLWDNIVYLDFRSLYPSIIITHNVSPDTLNREGCKEYDVAPEVGHKFCKDFPGFIPSLLGDLLEERQKIKRKMKATVDPLEKKLLDYRQRLIKILANSFYGYYGYAKARWYCKECAESVTAWGREYIEMVIRELEEKFGFKVLYADTDGLHATIPGADAETVKKKAKEFLKYINPKLPGLLELEYEGFYVRGFFVTKKKYAVIDEEGKITTRGLEIVRRDWSEIAKETQARVLEAILKHGDVEEAVRIVKEVTEKLSKYEVPPEKLVIHEQITRDLRDYKATGPHVAVAKRLAARGVKIRPGTVISYIVLKGSGRIGDRAIPADEFDPTKHRYDAEYYIENQVLPAVERILKAFGYRKEDLRYQKTKQVGSGAWLKVKGKKGTEAYVEQKLISEEDLNSAVDHHHHHH

SEQ ID NO: 139 - DNA, 2409 bp, Artificial Sequence
  Description of Artificial Sequence:Thermococcus species 9degreesN-7 mutant DNA polymerase, 9degreesN mutant
atgattctcgataccgactacatcaccgagaacgggaagcccgtgataagggtcttcaagaaggagaacggcgagtttaaaatcgagtacgacagaaccttcgagccctacttctacgcccttctgaaggacgattctgcgatagaggacgtcaagaaggtaaccgcaaagaggcacggaacggttgtcaaggtgaagcgcgccgagaaggtgcagaagaagttcctcggcaggccgatagaggtctggaagctctacttcaaccatcctcaggacgtcccggcgattcgagacaggatacgcgcccaccccgctgtcgttgacatctacgagtacgacatacccttcgccaagcgctacctcatcgacaagggcctgattccgatggagggcgacgaggagcttacgatgctcgccttcgcgatcgcaaccctctatcacgagggcgaggagttcggaaccgggccgattctcatgataagctacgccgacgggagcgaggcgagggtgataacctggaagaagattgaccttccgtacgttgacgtcgtctcgaccgagaaggagatgattaagcgcttcctccgcgtcgtcagggagaaggaccccgacgtgctcatcacctacaacggcgacaacttcgacttcgcctacctgaagaagcgctgtgaggaactcggaataaagttcacactcggcagggacgggagcgagccgaagatacagcgaatgggcgaccgctttgccgttgaggtgaagggcaggattcacttcgacctctaccccgtcataaggcgcacgataaacctcccgacctacacccttgaggccgtttacgaggccgtctttggaaagcccaaggagaaggtttacgcagaggagatagcgcaggcctgggagagcggggagggccttgaaagggttgcaagatactcgatggaggacgctaaggtgacctacgagctgggaagggagttcttcccgatggaggccgggctttcgaggcttataggccagagcctctgggacgtctcgcgctcgagcaccggaaatttggtggagtggttcctcctgcggaaggcctacaagaggaacgagctcgccccaaacaagcccgacgagagggagctcgcgagacggcgcgggggctacgctggcgggtacgttaaggaaccagagcggggattgtgggacaacattgtgtatttagacttccgctcgctgtatccttcaatcatcataacccacaacgtctcgccggataccctcaaccgcgagggctgtaaagagtacgacgtcgcccctgaggttggacacaagttctgcaaggacttccccggcttcataccaagcctcctgggagatttgctcgaggagaggcagaagataaagcggaagatgaaggcaacggttgacccgctggagaagaaactcctcgattacaggcagaggcttataaaaatcctcgccaacagcttctacggctactacggctacgccaaggcccggtggtactgcaaggagtgcgccgagagcgttacggcctggggaagggagtatatagaaatggttatccgggaactcgaagaaaaattcggttttaaagttctctatgccgatacagacggtctccatgctaccattcccggagcagacgctgaaacagtcaagaaaaaagcaaaggagttcttaaaatacattaatccaaaactgcccggcctgctcgaacttgagtacgagggcttctacgtgaggggcttcttcgtcacgaagaagaagtacgctgtgatagacgaggagggcaagataaccacgaggggtcttgagattgtgaggcgcgactggagcgagatagcgaaggagacccaggccagggtcttagaggcgatactcaagcacggtgacgtcgaggaggccgttaggatagtcaaggaagtgacggaaaagctgagcaagtatgaggtcccgcccgagaagctggtaatccacgagcagataacgcgcgatttgagggattacaaagccaccggcccgcacgttgccgttgcgaagaggctcgcggcgcgtggagtgaaaatccggcccggcacggtgataagctacatcgtcctaaagggctctggaaggataggcgacagggcgattccagctgatgagttcgacccgacgaagcaccgctacgatgcggaatactacatcgagaaccaggttctcccggcggtggagaggattctaaaagccttcggctatcggaaggaggatttgcgctaccagaagacgaagcaggtcggctcgggcgcgtggctgaaggtgaaggggaagaagggtaccgaagcttacgtagaacaaaaactcatctcagaagaggatctgaatagcgccgtcgaccatcatcatcatcatcattga

SEQ ID NO: 140 - protein, 802 aa, Artificial Sequence
  Description of Artificial Sequence:Thermococcus species 9degreesN-7 mutant DNA polymerase, 9degreesN mutant
MILDTDYITENGKPVIRVFKKENGEFKIEYDRTFEPYFYALLKDDSAIEDVKKVTAKRHGTVVKVKRAEKVQKKFLGRPIEVWKLYFNHPQDVPAIRDRIRAHPAVVDIYEYDIPFAKRYLIDKGLIPMEGDEELTMLAFAIATLYHEGEEFGTGPILMISYADGSEARVITWKKIDLPYVDVVSTEKEMIKRFLRVVREKDPDVLITYNGDNFDFAYLKKRCEELGIKFTLGRDGSEPKIQRMGDRFAVEVKGRIHFDLYPVIRRTINLPTYTLEAVYEAVFGKPKEKVYAEEIAQAWESGEGLERVARYSMEDAKVTYELGREFFPMEAGLSRLIGQSLWDVSRSSTGNLVEWFLLRKAYKRNELAPNKPDERELARRRGGYAGGYVKEPERGLWDNIVYLDFRSLYPSIIITHNVSPDTLNREGCKEYDVAPEVGHKFCKDFPGFIPSLLGDLLEERQKIKRKMKATVDPLEKKLLDYRQRLIKILANSFYGYYGYAKARWYCKECAESVTAWGREYIEMVIRELEEKFGFKVLYADTDGLHATIPGADAETVKKKAKEFLKYINPKLPGLLELEYEGFYVRGFFVTKKKYAVIDEEGKITTRGLEIVRRDWSEIAKETQARVLEAILKHGDVEEAVRIVKEVTEKLSKYEVPPEKLVIHEQITRDLRDYKATGPHVAVAKRLAARGVKIRPGTVISYIVLKGSGRIGDRAIPADEFDPTKHRYDAEYYIENQVLPAVERILKAFGYRKEDLRYQKTKQVGSGAWLKVKGKKGTEAYVEQKLISEEDLNSAVDHHHHHH

SEQ ID NO: 141 - DNA, 2409 bp, Artificial Sequence
  Description of Artificial Sequence:Thermococcus species 9degreesN-7 mutant DNA polymerase, 9degreesN mutant
atgattctcgataccgactacatcaccgagaacgggaagcccgtgataagggtcttcaagaaggagaacggcgagtttaaaatcgagtacgacagaaccttcgagccctacttctacgcccttctgaaggacgattctgcgatagaggacgtcaagaaggtaaccgcaaagaggcacggaacggttgtcaaggtgaagcgcgccgagaaggtgcagaagaagttcctcggcaggccgatagaggtctggaagctctacttcaaccatcctcaggacgtcccggcgattcgagacaggatacgcgcccaccccgctgtcgttgacatctacgagtacgacatacccttcgccaagcgctacctcatcgacaagggcctgattccgatggagggcgacgaggagcttacgatgctcgccttcgcgatcgcaaccctctatcacgagggcgaggagttcggaaccgggccgattctcatgataagctacgccgacgggagcgaggcgagggtgataacctggaagaagattgaccttccgtacgttgacgtcgtctcgaccgagaaggagatgattaagcgcttcctccgcgtcgtcagggagaaggaccccgacgtgctcatcacctacaacggcgacaacttcgacttcgcctacctgaagaagcgctgtgaggaactcggaataaagttcacactcggcagggacgggagcgagccgaagatacagcgaatgggcgaccgctttgccgttgaggtgaagggcaggattcacttcgacctctaccccgtcataaggcgcacgataaacctcccgacctacacccttgaggccgtttacgaggccgtctttggaaagcccaaggagaaggtttacgcagaggagatagcgcaggcctgggagagcggggagggccttgaaagggttgcaagatactcgatggaggacgctaaggtgacctacgagctgggaagggagttcttcccgatggaggcccagcgttcgaggcttataggccagagcctctgggacgtctcgcgctcgagcaccggaaatttggtggagtggttcctcctgcggaaggcctacaagaggaacgagctcgccccaaacaagcccgacgagagggagctcgcgagacggcgcgggggctacgctggcgggtacgttaaggaaccagagcggggattgtgggacaacattgtgtatttagacttccgctcgctgtatccttcaatcatcataacccacaacgtctcgccggataccctcaaccgcgagggctgtaaagagtacgacgtcgcccctgaggttggacacaagttctgcaaggacttccccggcttcataccaagcctcctgggagatttgctcgaggagaggcagaagataaagcggaagatgaaggcaacggttgacccgctggagaagaaactcctcgattacaggcagagggcgatcaagatcctcgccaacagcttctacggctactacggctacgccaaggcccggtggtactgcaaggagtgcgccgagagcgttacggcctggggaagggagtatatagaaatggttatccgggaactcgaagaaaaattcggttttaaagttctctatgccgatacagacggtctccatgctaccattcccggagcagacgctgaaacagtcaagaaaaaagcaaaggagttcttaaaatacattaatccaaaactgcccggcctgctcgaacttgagtacgagggcttctacgtgaggggcttcttcgtcacgaagaagaagtacgctgtgatagacgaggagggcaagataaccacgaggggtcttgagattgtgaggcgcgactggagcgagatagcgaaggagacccaggccagggtcttagaggcgatactcaagcacggtgacgtcgaggaggccgttaggatagtcaaggaagtgacggaaaagctgagcaagtatgaggtcccgcccgagaagctggtaatccacgagcagataacgcgcgatttgagggattacaaagccaccggcccgcacgttgccgttgcgaagaggctcgcggcgcgtggagtgaaaatccggcccggcacggtgataagctacatcgtcctaaagggctctggaaggataggcgacagggcgattccagctgatgagttcgacccgacgaagcaccgctacgatgcggaatactacatcgagaaccaggttctcccggcggtggagaggattctaaaagccttcggctatcggaaggaggatttgcgctaccagaagacgaagcaggtcggctcgggcgcgtggctgaaggtgaaggggaagaagggtaccgaagcttacgtagaacaaaaactcatctcagaagaggatctgaatagcgccgtcgaccatcatcatcatcatcattga

SEQ ID NO: 142 - protein, 802 aa, Artificial Sequence
  Description of Artificial Sequence:Thermococcus species 9degreesN-7 mutant DNA polymerase, 9degreesN mutant
MILDTDYITENGKPVIRVFKKENGEFKIEYDRTFEPYFYALLKDDSAIEDVKKVTAKRHGTVVKVKRAEKVQKKFLGRPIEVWKLYFNHPQDVPAIRDRIRAHPAVVDIYEYDIPFAKRYLIDKGLIPMEGDEELTMLAFAIATLYHEGEEFGTGPILMISYADGSEARVITWKKIDLPYVDVVSTEKEMIKRFLRVVREKDPDVLITYNGDNFDFAYLKKRCEELGIKFTLGRDGSEPKIQRMGDRFAVEVKGRIHFDLYPVIRRTINLPTYTLEAVYEAVFGKPKEKVYAEEIAQAWESGEGLERVARYSMEDAKVTYELGREFFPMEAQRSRLIGQSLWDVSRSSTGNLVEWFLLRKAYKRNELAPNKPDERELARRRGGYAGGYVKEPERGLWDNIVYLDFRSLYPSIIITHNVSPDTLNREGCKEYDVAPEVGHKFCKDFPGFIPSLLGDLLEERQKIKRKMKATVDPLEKKLLDYRQRAIKILANSFYGYYGYAKARWYCKECAESVTAWGREYIEMVIRELEEKFGFKVLYADTDGLHATIPGADAETVKKKAKEFLKYINPKLPGLLELEYEGFYVRGFFVTKKKYAVIDEEGKITTRGLEIVRRDWSEIAKETQARVLEAILKHGDVEEAVRIVKEVTEKLSKYEVPPEKLVIHEQITRDLRDYKATGPHVAVAKRLAARGVKIRPGTVISYIVLKGSGRIGDRAIPADEFDPTKHRYDAEYYIENQVLPAVERILKAFGYRKEDLRYQKTKQVGSGAWLKVKGKKGTEAYVEQKLISEEDLNSAVDHHHHHH

SEQ ID NO: 143 - DNA, 2409 bp, Artificial Sequence
  Description of Artificial Sequence:Thermococcus species 9degreesN-7 mutant DNA polymerase, 9degreesN mutant
atgattctcgataccgactacatcaccgagaacgggaagcccgtgataagggtcttcaagaaggagaacggcgagtttaaaatcgagtacgacagaaccttcgagccctacttctacgcccttctgaaggacgattctgcgatagaggacgtcaagaaggtaaccgcaaagaggcacggaacggttgtcaaggtgaagcgcgccgagaaggtgcagaagaagttcctcggcaggccgatagaggtctggaagctctacttcaaccatcctcaggacgtcccggcgattcgagacaggatacgcgcccaccccgctgtcgttgacatctacgagtacgacatacccttcgccaagcgctacctcatcgacaagggcctgattccgatggagggcgacgaggagcttacgatgctcgccttcgcgatcgcaaccctctatcacgagggcgaggagttcggaaccgggccgattctcatgataagctacgccgacgggagcgaggcgagggtgataacctggaagaagattgaccttccgtacgttgacgtcgtctcgaccgagaaggagatgattaagcgcttcctccgcgtcgtcagggagaaggaccccgacgtgctcatcacctacaacggcgacaacttcgacttcgcctacctgaagaagcgctgtgaggaactcggaataaagttcacactcggcagggacgggagcgagccgaagatacagcgaatgggcgaccgctttgccgttgaggtgaagggcaggattcacttcgacctctaccccgtcataaggcgcacgataaacctcccgacctacacccttgaggccgtttacgaggccgtctttggaaagcccaaggagaaggtttacgcagaggagatagcgcaggcctgggagagcggggagggccttgaaagggttgcaagatactcgatggaggacgctaaggtgacctacgagctgggaagggagttcttcccgatggaggcccaagactcgaggcttataggccagagcctctgggacgtctcgcgctcgagcaccggaaatttggtggagtggttcctcctgcggaaggcctacaagaggaacgagctcgccccaaacaagcccgacgagagggagctcgcgagacggcgcgggggctacgctggcgggtacgttaaggaaccagagcggggattgtgggacaacattgtgtatttagacttccgctcgctgtatccttcaatcatcataacccacaacgtctcgccggataccctcaaccgcgagggctgtaaagagtacgacgtcgcccctgaggttggacacaagttctgcaaggacttccccggcttcataccaagcctcctgggagatttgctcgaggagaggcagaagataaagcggaagatgaaggcaacggttgacccgctggagaagaaactcctcgattacaggcagaggcttataaaaatcctcgccaacagcttctacggctactacggctacgccaaggcccggtggtactgcaaggagtgcgccgagagcgttacggcctggggaagggagtatatagaaatggttatccgggaactcgaagaaaaattcggttttaaagttctctatgccgatacagacggtctccatgctaccattcccggagcagacgctgaaacagtcaagaaaaaagcaaaggagttcttaaaatacattaatccaaaactgcccggcctgctcgaacttgagtacgagggcttctacgtgaggggcttcttcgtcacgaagaagaagtacgctgtgatagacgaggagggcaagataaccacgaggggtcttgagattgtgaggcgcgactggagcgagatagcgaaggagacccaggccagggtcttagaggcgatactcaagcacggtgacgtcgaggaggccgttaggatagtcaaggaagtgacggaaaagctgagcaagtatgaggtcccgcccgagaagctggtaatccacgagcagataacgcgcgatttgagggattacaaagccaccggcccgcacgttgccgttgcgaagaggctcgcggcgcgtggagtgaaaatccggcccggcacggtgataagctacatcgtcctaaagggctctggaaggataggcgacagggcgattccagctgatgagttcgacccgacgaagcaccgctacgatgcggaatactacatcgagaaccaggttctcccggcggtggagaggattctaaaagccttcggctatcggaaggaggatttgcgctaccagaagacgaagcaggtcggctcgggcgcgtggctgaaggtgaaggggaagaagggtaccgaagcttacgtagaacaaaaactcatctcagaagaggatctgaatagcgccgtcgaccatcatcatcatcatcattga

SEQ ID NO: 144 - protein, 802 aa, Artificial Sequence
  Description of Artificial Sequence:Thermococcus species 9degreesN-7 mutant DNA polymerase, 9degreesN mutant
MILDTDYITENGKPVIRVFKKENGEFKIEYDRTFEPYFYALLKDDSAIEDVKKVTAKRHGTVVKVKRAEKVQKKFLGRPIEVWKLYFNHPQDVPAIRDRIRAHPAVVDIYEYDIPFAKRYLIDKGLIPMEGDEELTMLAFAIATLYHEGEEFGTGPILMISYADGSEARVITWKKIDLPYVDVVSTEKEMIKRFLRVVREKDPDVLITYNGDNFDFAYLKKRCEELGIKFTLGRDGSEPKIQRMGDRFAVEVKGRIHFDLYPVIRRTINLPTYTLEAVYEAVFGKPKEKVYAEEIAQAWESGEGLERVARYSMEDAKVTYELGREFFPMEAQDSRLIGQSLWDVSRSSTGNLVEWFLLRKAYKRNELAPNKPDERELARRRGGYAGGYVKEPERGLWDNIVYLDFRSLYPSIIITHNVSPDTLNREGCKEYDVAPEVGHKFCKDFPGFIPSLLGDLLEERQKIKRKMKATVDPLEKKLLDYRQRLIKILANSFYGYYGYAKARWYCKECAESVTAWGREYIEMVIRELEEKFGFKVLYADTDGLHATIPGADAETVKKKAKEFLKYINPKLPGLLELEYEGFYVRGFFVTKKKYAVIDEEGKITTRGLEIVRRDWSEIAKETQARVLEAILKHGDVEEAVRIVKEVTEKLSKYEVPPEKLVIHEQITRDLRDYKATGPHVAVAKRLAARGVKIRPGTVISYIVLKGSGRIGDRAIPADEFDPTKHRYDAEYYIENQVLPAVERILKAFGYRKEDLRYQKTKQVGSGAWLKVKGKKGTEAYVEQKLISEEDLNSAVDHHHHHH

SEQ ID NO: 145 - DNA, 2409 bp, Artificial Sequence
  Description of Artificial Sequence:Thermococcus species 9degreesN-7 mutant DNA polymerase, 9degreesN mutant
atgattctcgataccgactacatcaccgagaacgggaagcccgtgataagggtcttcaagaaggagaacggcgagtttaaaatcgagtacgacagaaccttcgagccctacttctacgcccttctgaaggacgattctgcgatagaggacgtcaagaaggtaaccgcaaagaggcacggaacggttgtcaaggtgaagcgcgccgagaaggtgcagaagaagttcctcggcaggccgatagaggtctggaagctctacttcaaccatcctcaggacgtcccggcgattcgagacaggatacgcgcccaccccgctgtcgttgacatctacgagtacgacatacccttcgccaagcgctacctcatcgacaagggcctgattccgatggagggcgacgaggagcttacgatgctcgccttcgcgatcgcaaccctctatcacgagggcgaggagttcggaaccgggccgattctcatgataagctacgccgacgggagcgaggcgagggtgataacctggaagaagattgaccttccgtacgttgacgtcgtctcgaccgagaaggagatgattaagcgcttcctccgcgtcgtcagggagaaggaccccgacgtgctcatcacctacaacggcgacaacttcgacttcgcctacctgaagaagcgctgtgaggaactcggaataaagttcacactcggcagggacgggagcgagccgaagatacagcgaatgggcgaccgctttgccgttgaggtgaagggcaggattcacttcgacctctaccccgtcataaggcgcacgataaacctcccgacctacacccttgaggccgtttacgaggccgtctttggaaagcccaaggagaaggtttacgcagaggagatagcgcaggcctgggagagcggggagggccttgaaagggttgcaagatactcgatggaggacgctaaggtgacctacgagctgggaagggagttcttcccgatggaggcccagcgctcgaggcttataggccagagcctctgggacgtctcgcgctcgagcaccggaaatttggtggagtggttcctcctgcggaaggcctacaagaggaacgagctcgccccaaacaagcccgacgagagggagctcgcgagacggcgcgggggctacgctggcgggtacgttaaggaaccagagcggggattgtgggacaacattgtgtatttagacttccgctcgctgtatccttcaatcatcataacccacaacgtctcgccggataccctcaaccgcgagggctgtaaagagtacgacgtcgcccctgaggttggacacaagttctgcaaggacttccccggcttcataccaagcctcctgggagatttgctcgaggagaggcagaagataaagcggaagatgaaggcaacggttgacccgctggagaagaaactcctcgattacaggcagaggcttataaaaatcctcgccaacagcttctacggctactacggctacgccaaggcccggtggtactgcaaggagtgcgccgagagcgttacggcctggggaagggagtatatagaaatggttatccgggaactcgaagaaaaattcggttttaaagttctctatgccgatacagacggtctccatgctaccattcccggagcagacgctgaaacagtcaagaaaaaagcaaaggagttcttaaaatacattaatccaaaactgcccggcctgctcgaacttgagtacgagggcttctacgtgaggggcttcttcgtcacgaagaagaagtacgctgtgatagacgaggagggcaagataaccacgaggggtcttgagattgtgaggcgcgactggagcgagatagcgaaggagacccaggccagggtcttagaggcgatactcaagcacggtgacgtcgaggaggccgttaggatagtcaaggaagtgacggaaaagctgagcaagtatgaggtcccgcccgagaagctggtaatccacgagcagataacgcgcgatttgagggattacaaagccaccggcccgcacgttgccgttgcgaagaggctcgcggcgcgtggagtgaaaatccggcccggcacggtgataagctacatcgtcctaaagggctctggaaggataggcgacagggcgattccagctgatgagttcgacccgacgaagcaccgctacgatgcggaatactacatcgagaaccaggttctcccggcggtggagaggattctaaaagccttcggctatcggaaggaggatttgcgctaccagaagacgaagcaggtcggctcgggcgcgtggctgaaggtgaaggggaagaagggtaccgaagcttacgtagaacaaaaactcatctcagaagaggatctgaatagcgccgtcgaccatcatcatcatcatcattga

SEQ ID NO: 146 - protein, 802 aa, Artificial Sequence
  Description of Artificial Sequence:Thermococcus species 9degreesN-7 mutant DNA polymerase, 9degreesN mutant
MILDTDYITENGKPVIRVFKKENGEFKIEYDRTFEPYFYALLKDDSAIEDVKKVTAKRHGTVVKVKRAEKVQKKFLGRPIEVWKLYFNHPQDVPAIRDRIRAHPAVVDIYEYDIPFAKRYLIDKGLIPMEGDEELTMLAFAIATLYHEGEEFGTGPILMISYADGSEARVITWKKIDLPYVDVVSTEKEMIKRFLRVVREKDPDVLITYNGDNFDFAYLKKRCEELGIKFTLGRDGSEPKIQRMGDRFAVEVKGRIHFDLYPVIRRTINLPTYTLEAVYEAVFGKPKEKVYAEEIAQAWESGEGLERVARYSMEDAKVTYELGREFFPMEAQRSRLIGQSLWDVSRSSTGNLVEWFLLRKAYKRNELAPNKPDERELARRRGGYAGGYVKEPERGLWDNIVYLDFRSLYPSIIITHNVSPDTLNREGCKEYDVAPEVGHKFCKDFPGFIPSLLGDLLEERQKIKRKMKATVDPLEKKLLDYRQRLIKILANSFYGYYGYAKARWYCKECAESVTAWGREYIEMVIRELEEKFGFKVLYADTDGLHATIPGADAETVKKKAKEFLKYINPKLPGLLELEYEGFYVRGFFVTKKKYAVIDEEGKITTRGLEIVRRDWSEIAKETQARVLEAILKHGDVEEAVRIVKEVTEKLSKYEVPPEKLVIHEQITRDLRDYKATGPHVAVAKRLAARGVKIRPGTVISYIVLKGSGRIGDRAIPADEFDPTKHRYDAEYYIENQVLPAVERILKAFGYRKEDLRYQKTKQVGSGAWLKVKGKKGTEAYVEQKLISEEDLNSAVDHHHHHH

SEQ ID NO: 147 - DNA, 2409 bp, Artificial Sequence
  Description of Artificial Sequence:Thermococcus species 9degreesN-7 mutant DNA polymerase, 9degreesN mutant
atgattctcgataccgactacatcaccgagaacgggaagcccgtgataagggtcttcaagaaggagaacggcgagtttaaaatcgagtacgacagaaccttcgagccctacttctacgcccttctgaaggacgattctgcgatagaggacgtcaagaaggtaaccgcaaagaggcacggaacggttgtcaaggtgaagcgcgccgagaaggtgcagaagaagttcctcggcaggccgatagaggtctggaagctctacttcaaccatcctcaggacgtcccggcgattcgagacaggatacgcgcccaccccgctgtcgttgacatctacgagtacgacatacccttcgccaagcgctacctcatcgacaagggcctgattccgatggagggcgacgaggagcttacgatgctcgccttcgcgatcgcaaccctctatcacgagggcgaggagttcggaaccgggccgattctcatgataagctacgccgacgggagcgaggcgagggtgataacctggaagaagattgaccttccgtacgttgacgtcgtctcgaccgagaaggagatgattaagcgcttcctccgcgtcgtcagggagaaggaccccgacgtgctcatcacctacaacggcgacaacttcgacttcgcctacctgaagaagcgctgtgaggaactcggaataaagttcacactcggcagggacgggagcgagccgaagatacagcgaatgggcgaccgctttgccgttgaggtgaagggcaggattcacttcgacctctaccccgtcataaggcgcacgataaacctcccgacctacacccttgaggccgtttacgaggccgtctttggaaagcccaaggagaaggtttacgcagaggagatagcgcaggcctgggagagcggggagggccttgaaagggttgcaagatactcgatggaggacgctaaggtgacctacgagctgggaagggagttcttcccgatggaggcccagccgtcgaggcttataggccagagcctctgggacgtctcgcgctcgagcaccggaaatttggtggagtggttcctcctgcggaaggcctacaagaggaacgagctcgccccaaacaagcccgacgagagggagctcgcgagacggcgcgggggctacgctggcgggtacgttaaggaaccagagcggggattgtgggacaacattgtgtatttagacttccgctcgctgtatccttcaatcatcataacccacaacgtctcgccggataccctcaaccgcgagggctgtaaagagtacgacgtcgcccctgaggttggacacaagttctgcaaggacttccccggcttcataccaagcctcctgggagatttgctcgaggagaggcagaagataaagcggaagatgaaggcaacggttgacccgctggagaagaaactcctcgattacaggcagagggcgatcaagatcctcgccaacagcttctacggctactacggctacgccaaggcccggtggtactgcaaggagtgcgccgagagcgttacggcctggggaagggagtatatagaaatggttatccgggaactcgaagaaaaattcggttttaaagttctctatgccgatacagacggtctccatgctaccattcccggagcagacgctgaaacagtcaagaaaaaagcaaaggagttcttaaaatacattaatccaaaactgcccggcctgctcgaacttgagtacgagggcttctacgtgaggggcttcttcgtcacgaagaagaagtacgctgtgatagacgaggagggcaagataaccacgaggggtcttgagattgtgaggcgcgactggagcgagatagcgaaggagacccaggccagggtcttagaggcgatactcaagcacggtgacgtcgaggaggccgttaggatagtcaaggaagtgacggaaaagctgagcaagtatgaggtcccgcccgagaagctggtaatccacgagcagataacgcgcgatttgagggattacaaagccaccggcccgcacgttgccgttgcgaagaggctcgcggcgcgtggagtgaaaatccggcccggcacggtgataagctacatcgtcctaaagggctctggaaggataggcgacagggcgattccagctgatgagttcgacccgacgaagcaccgctacgatgcggaatactacatcgagaaccaggttctcccggcggtggagaggattctaaaagccttcggctatcggaaggaggatttgcgctaccagaagacgaagcaggtcggctcgggcgcgtggctgaaggtgaaggggaagaagggtaccgaagcttacgtagaacaaaaactcatctcagaagaggatctgaatagcgccgtcgaccatcatcatcatcatcattga

SEQ ID NO: 148 - protein, 802 aa, Artificial Sequence
  Description of Artificial Sequence:Thermococcus species 9degreesN-7 mutant DNA polymerase, 9degreesN mutant
MILDTDYITENGKPVIRVFKKENGEFKIEYDRTFEPYFYALLKDDSAIEDVKKVTAKRHGTVVKVKRAEKVQKKFLGRPIEVWKLYFNHPQDVPAIRDRIRAHPAVVDIYEYDIPFAKRYLIDKGLIPMEGDEELTMLAFAIATLYHEGEEFGTGPILMISYADGSEARVITWKKIDLPYVDVVSTEKEMIKRFLRVVREKDPDVLITYNGDNFDFAYLKKRCEELGIKFTLGRDGSEPKIQRMGDRFAVEVKGRIHFDLYPVIRRTINLPTYTLEAVYEAVFGKPKEKVYAEEIAQAWESGEGLERVARYSMEDAKVTYELGREFFPMEAQPSRLIGQSLWDVSRSSTGNLVEWFLLRKAYKRNELAPNKPDERELARRRGGYAGGYVKEPERGLWDNIVYLDFRSLYPSIIITHNVSPDTLNREGCKEYDVAPEVGHKFCKDFPGFIPSLLGDLLEERQKIKRKMKATVDPLEKKLLDYRQRAIKILANSFYGYYGYAKARWYCKECAESVTAWGREYIEMVIRELEEKFGFKVLYADTDGLHATIPGADAETVKKKAKEFLKYINPKLPGLLELEYEGFYVRGFFVTKKKYAVIDEEGKITTRGLEIVRRDWSEIAKETQARVLEAILKHGDVEEAVRIVKEVTEKLSKYEVPPEKLVIHEQITRDLRDYKATGPHVAVAKRLAARGVKIRPGTVISYIVLKGSGRIGDRAIPADEFDPTKHRYDAEYYIENQVLPAVERILKAFGYRKEDLRYQKTKQVGSGAWLKVKGKKGTEAYVEQKLISEEDLNSAVDHHHHHH

SEQ ID NO: 149 - DNA, 2409 bp, Artificial Sequence
  Description of Artificial Sequence:Thermococcus species 9degreesN-7 mutant DNA polymerase, 9degreesN mutant
atgattctcgataccgactacatcaccgagaacgggaagcccgtgataagggtcttcaagaaggagaacggcgagtttaaaatcgagtacgacagaaccttcgagccctacttctacgcccttctgaaggacgattctgcgatagaggacgtcaagaaggtaaccgcaaagaggcacggaacggttgtcaaggtgaagcgcgccgagaaggtgcagaagaagttcctcggcaggccgatagaggtctggaagctctacttcaaccatcctcaggacgtcccggcgattcgagacaggatacgcgcccaccccgctgtcgttgacatctacgagtacgacatacccttcgccaagcgctacctcatcgacaagggcctgattccgatggagggcgacgaggagcttacgatgctcgccttcgcgatcgcaaccctctatcacgagggcgaggagttcggaaccgggccgattctcatgataagctacgccgacgggagcgaggcgagggtgataacctggaagaagattgaccttccgtacgttgacgtcgtctcgaccgagaaggagatgattaagcgcttcctccgcgtcgtcagggagaaggaccccgacgtgctcatcacctacaacggcgacaacttcgacttcgcctacctgaagaagcgctgtgaggaactcggaataaagttcacactcggcagggacgggagcgagccgaagatacagcgaatgggcgaccgctttgccgttgaggtgaagggcaggattcacttcgacctctaccccgtcataaggcgcacgataaacctcccgacctacacccttgaggccgtttacgaggccgtctttggaaagcccaaggagaaggtttacgcagaggagatagcgcaggcctgggagagcggggagggccttgaaagggttgcaagatactcgatggaggacgctaaggtgacctacgagctgggaagggagttcttcccgatggaggcccagggttcgaggcttataggccagagcctctgggacgtctcgcgctcgagcaccggaaatttggtggagtggttcctcctgcggaaggcctacaagaggaacgagctcgccccaaacaagcccgacgagagggagctcgcgagacggcgcgggggctacgctggcgggtacgttaaggaaccagagcggggattgtgggacaacattgtgtatttagacttccgctcgctgtatccttcaatcatcataacccacaacgtctcgccggataccctcaaccgcgagggctgtaaagagtacgacgtcgcccctgaggttggacacaagttctgcaaggacttccccggcttcataccaagcctcctgggagatttgctcgaggagaggcagaagataaagcggaagatgaaggcaacggttgacccgctggagaagaaactcctcgattacaggcagagggcgatcaagatcctcgccaacagcttctacggctactacggctacgccaaggcccggtggtactgcaaggagtgcgccgagagcgttacggcctggggaagggagtatatagaaatggttatccgggaactcgaagaaaaattcggttttaaagttctctatgccgatacagacggtctccatgctaccattcccggagcagacgctgaaacagtcaagaaaaaagcaaaggagttcttaaaatacattaatccaaaactgcccggcctgctcgaacttgagtacgagggcttctacgtgaggggcttcttcgtcacgaagaagaagtacgctgtgatagacgaggagggcaagataaccacgaggggtcttgagattgtgaggcgcgactggagcgagatagcgaaggagacccaggccagggtcttagaggcgatactcaagcacggtgacgtcgaggaggccgttaggatagtcaaggaagtgacggaaaagctgagcaagtatgaggtcccgcccgagaagctggtaatccacgagcagataacgcgcgatttgagggattacaaagccaccggcccgcacgttgccgttgcgaagaggctcgcggcgcgtggagtgaaaatccggcccggcacggtgataagctacatcgtcctaaagggctctggaaggataggcgacagggcgattccagctgatgagttcgacccgacgaagcaccgctacgatgcggaatactacatcgagaaccaggttctcccggcggtggagaggattctaaaagccttcggctatcggaaggaggatttgcgctaccagaagacgaagcaggtcggctcgggcgcgtggctgaaggtgaaggggaagaagggtaccgaagcttacgtagaacaaaaactcatctcagaagaggatctgaatagcgccgtcgaccatcatcatcatcatcattga

SEQ ID NO: 150 - protein, 802 aa, Artificial Sequence
  Description of Artificial Sequence:Thermococcus species 9degreesN-7 mutant DNA polymerase, 9degreesN mutant
MILDTDYITENGKPVIRVFKKENGEFKIEYDRTFEPYFYALLKDDSAIEDVKKVTAKRHGTVVKVKRAEKVQKKFLGRPIEVWKLYFNHPQDVPAIRDRIRAHPAVVDIYEYDIPFAKRYLIDKGLIPMEGDEELTMLAFAIATLYHEGEEFGTGPILMISYADGSEARVITWKKIDLPYVDVVSTEKEMIKRFLRVVREKDPDVLITYNGDNFDFAYLKKRCEELGIKFTLGRDGSEPKIQRMGDRFAVEVKGRIHFDLYPVIRRTINLPTYTLEAVYEAVFGKPKEKVYAEEIAQAWESGEGLERVARYSMEDAKVTYELGREFFPMEAQGSRLIGQSLWDVSRSSTGNLVEWFLLRKAYKRNELAPNKPDERELARRRGGYAGGYVKEPERGLWDNIVYLDFRSLYPSIIITHNVSPDTLNREGCKEYDVAPEVGHKFCKDFPGFIPSLLGDLLEERQKIKRKMKATVDPLEKKLLDYRQRAIKILANSFYGYYGYAKARWYCKECAESVTAWGREYIEMVIRELEEKFGFKVLYADTDGLHATIPGADAETVKKKAKEFLKYINPKLPGLLELEYEGFYVRGFFVTKKKYAVIDEEGKITTRGLEIVRRDWSEIAKETQARVLEAILKHGDVEEAVRIVKEVTEKLSKYEVPPEKLVIHEQITRDLRDYKATGPHVAVAKRLAARGVKIRPGTVISYIVLKGSGRIGDRAIPADEFDPTKHRYDAEYYIENQVLPAVERILKAFGYRKEDLRYQKTKQVGSGAWLKVKGKKGTEAYVEQKLISEEDLNSAVDHHHHHH

SEQ ID NO: 151 - DNA, 2409 bp, Artificial Sequence
  Description of Artificial Sequence:Thermococcus species 9degreesN-7 mutant DNA polymerase, 9degreesN mutant
atgattctcgataccgactacatcaccgagaacgggaagcccgtgataagggtcttcaagaaggagaacggcgagtttaaaatcgagtacgacagaaccttcgagccctacttctacgcccttctgaaggacgattctgcgatagaggacgtcaagaaggtaaccgcaaagaggcacggaacggttgtcaaggtgaagcgcgccgagaaggtgcagaagaagttcctcggcaggccgatagaggtctggaagctctacttcaaccatcctcaggacgtcccggcgattcgagacaggatacgcgcccaccccgctgtcgttgacatctacgagtacgacatacccttcgccaagcgctacctcatcgacaagggcctgattccgatggagggcgacgaggagcttacgatgctcgccttcgcgatcgcaaccctctatcacgagggcgaggagttcggaaccgggccgattctcatgataagctacgccgacgggagcgaggcgagggtgataacctggaagaagattgaccttccgtacgttgacgtcgtctcgaccgagaaggagatgattaagcgcttcctccgcgtcgtcagggagaaggaccccgacgtgctcatcacctacaacggcgacaacttcgacttcgcctacctgaagaagcgctgtgaggaactcggaataaagttcacactcggcagggacgggagcgagccgaagatacagcgaatgggcgaccgctttgccgttgaggtgaagggcaggattcacttcgacctctaccccgtcataaggcgcacgataaacctcccgacctacacccttgaggccgtttacgaggccgtctttggaaagcccaaggagaaggtttacgcagaggagatagcgcaggcctgggagagcggggagggccttgaaagggttgcaagatactcgatggaggacgctaaggtgacctacgagctgggaagggagttcttcccgatggaggcccagctttcgaggataataggccagagcctctgggacgtctcgcgctcgagcaccggaaatttggtggagtggttcctcctgcggaaggcctacaagaggaacgagctcgccccaaacaagcccgacgagagggagctcgcgagacggcgcgggggctacgctggcgggtacgttaaggaaccagagcggggattgtgggacaacattgtgtatttagacttccgctcgctgtatccttcaatcatcataacccacaacgtctcgccggataccctcaaccgcgagggctgtaaagagtacgacgtcgcccctgaggttggacacaagttctgcaaggacttccccggcttcataccaagcctcctgggagatttgctcgaggagaggcagaagataaagcggaagatgaaggcaacggttgacccgctggagaagaaactcctcgattacaggcagaggcttataaaaatcctcgccaacagcttctacggctactacggctacgccaaggcccggtggtactgcaaggagtgcgccgagagcgttacggcctggggaagggagtatatagaaatggttatccgggaactcgaagaaaaattcggttttaaagttctctatgccgatacagacggtctccatgctaccattcccggagcagacgctgaaacagtcaagaaaaaagcaaaggagttcttaaaatacattaatccaaaactgcccggcctgctcgaacttgagtacgagggcttctacgtgaggggcttcttcgtcacgaagaagaagtacgctgtgatagacgaggagggcaagataaccacgaggggtcttgagattgtgaggcgcgactggagcgagatagcgaaggagacccaggccagggtcttagaggcgatactcaagcacggtgacgtcgaggaggccgttaggatagtcaaggaagtgacggaaaagctgagcaagtatgaggtcccgcccgagaagctggtaatccacgagcagataacgcgcgatttgagggattacaaagccaccggcccgcacgttgccgttgcgaagaggctcgcggcgcgtggagtgaaaatccggcccggcacggtgataagctacatcgtcctaaagggctctggaaggataggcgacagggcgattccagctgatgagttcgacccgacgaagcaccgctacgatgcggaatactacatcgagaaccaggttctcccggcggtggagaggattctaaaagccttcggctatcggaaggaggatttgcgctaccagaagacgaagcaggtcggctcgggcgcgtggctgaaggtgaaggggaagaagggtaccgaagcttacgtagaacaaaaactcatctcagaagaggatctgaatagcgccgtcgaccatcatcatcatcatcattga

SEQ ID NO: 152 - protein, 802 aa, Artificial Sequence
  Description of Artificial Sequence:Thermococcus species 9degreesN-7 mutant DNA polymerase, 9degreesN mutant
MILDTDYITENGKPVIRVFKKENGEFKIEYDRTFEPYFYALLKDDSAIEDVKKVTAKRHGTVVKVKRAEKVQKKFLGRPIEVWKLYFNHPQDVPAIRDRIRAHPAVVDIYEYDIPFAKRYLIDKGLIPMEGDEELTMLAFAIATLYHEGEEFGTGPILMISYADGSEARVITWKKIDLPYVDVVSTEKEMIKRFLRVVREKDPDVLITYNGDNFDFAYLKKRCEELGIKFTLGRDGSEPKIQRMGDRFAVEVKGRIHFDLYPVIRRTINLPTYTLEAVYEAVFGKPKEKVYAEEIAQAWESGEGLERVARYSMEDAKVTYELGREFFPMEAQLSRIIGQSLWDVSRSSTGNLVEWFLLRKAYKRNELAPNKPDERELARRRGGYAGGYVKEPERGLWDNIVYLDFRSLYPSIIITHNVSPDTLNREGCKEYDVAPEVGHKFCKDFPGFIPSLLGDLLEERQKIKRKMKATVDPLEKKLLDYRQRLIKILANSFYGYYGYAKARWYCKECAESVTAWGREYIEMVIRELEEKFGFKVLYADTDGLHATIPGADAETVKKKAKEFLKYINPKLPGLLELEYEGFYVRGFFVTKKKYAVIDEEGKITTRGLEIVRRDWSEIAKETQARVLEAILKHGDVEEAVRIVKEVTEKLSKYEVPPEKLVIHEQITRDLRDYKATGPHVAVAKRLAARGVKIRPGTVISYIVLKGSGRIGDRAIPADEFDPTKHRYDAEYYIENQVLPAVERILKAFGYRKEDLRYQKTKQVGSGAWLKVKGKKGTEAYVEQKLISEEDLNSAVDHHHHHH

SEQ ID NO: 153 - DNA, 2409 bp, Artificial Sequence
  Description of Artificial Sequence:Thermococcus species 9degreesN-7 mutant DNA polymerase, 9degreesN mutant
atgattctcgataccgactacatcaccgagaacgggaagcccgtgataagggtcttcaagaaggagaacggcgagtttaaaatcgagtacgacagaaccttcgagccctacttctacgcccttctgaaggacgattctgcgatagaggacgtcaagaaggtaaccgcaaagaggcacggaacggttgtcaaggtgaagcgcgccgagaaggtgcagaagaagttcctcggcaggccgatagaggtctggaagctctacttcaaccatcctcaggacgtcccggcgattcgagacaggatacgcgcccaccccgctgtcgttgacatctacgagtacgacatacccttcgccaagcgctacctcatcgacaagggcctgattccgatggagggcgacgaggagcttacgatgctcgccttcgcgatcgcaaccctctatcacgagggcgaggagttcggaaccgggccgattctcatgataagctacgccgacgggagcgaggcgagggtgataacctggaagaagattgaccttccgtacgttgacgtcgtctcgaccgagaaggagatgattaagcgcttcctccgcgtcgtcagggagaaggaccccgacgtgctcatcacctacaacggcgacaacttcgacttcgcctacctgaagaagcgctgtgaggaactcggaataaagttcacactcggcagggacgggagcgagccgaagatacagcgaatgggcgaccgctttgccgttgaggtgaagggcaggattcacttcgacctctaccccgtcataaggcgcacgataaacctcccgacctacacccttgaggccgtttacgaggccgtctttggaaagcccaaggagaaggtttacgcagaggagatagcgcaggcctgggagagcggggagggccttgaaagggttgcaagatactcgatggaggacgctaaggtgacctacgagctgggaagggagttcttcccgatggaggcccagctttcgaggtccataggccagagcctctgggacgtctcgcgctcgagcaccggaaatttggtggagtggttcctcctgcggaaggcctacaagaggaacgagctcgccccaaacaagcccgacgagagggagctcgcgagacggcgcgggggctacgctggcgggtacgttaaggaaccagagcggggattgtgggacaacattgtgtatttagacttccgctcgctgtatccttcaatcatcataacccacaacgtctcgccggataccctcaaccgcgagggctgtaaagagtacgacgtcgcccctgaggttggacacaagttctgcaaggacttccccggcttcataccaagcctcctgggagatttgctcgaggagaggcagaagataaagcggaagatgaaggcaacggttgacccgctggagaagaaactcctcgattacaggcagaggcttataaaaatcctcgccaacagcttctacggctactacggctacgccaaggcccggtggtactgcaaggagtgcgccgagagcgttacggcctggggaagggagtatatagaaatggttatccgggaactcgaagaaaaattcggttttaaagttctctatgccgatacagacggtctccatgctaccattcccggagcagacgctgaaacagtcaagaaaaaagcaaaggagttcttaaaatacattaatccaaaactgcccggcctgctcgaacttgagtacgagggcttctacgtgaggggcttcttcgtcacgaagaagaagtacgctgtgatagacgaggagggcaagataaccacgaggggtcttgagattgtgaggcgcgactggagcgagatagcgaaggagacccaggccagggtcttagaggcgatactcaagcacggtgacgtcgaggaggccgttaggatagtcaaggaagtgacggaaaagctgagcaagtatgaggtcccgcccgagaagctggtaatccacgagcagataacgcgcgatttgagggattacaaagccaccggcccgcacgttgccgttgcgaagaggctcgcggcgcgtggagtgaaaatccggcccggcacggtgataagctacatcgtcctaaagggctctggaaggataggcgacagggcgattccagctgatgagttcgacccgacgaagcaccgctacgatgcggaatactacatcgagaaccaggttctcccggcggtggagaggattctaaaagccttcggctatcggaaggaggatttgcgctaccagaagacgaagcaggtcggctcgggcgcgtggctgaaggtgaaggggaagaagggtaccgaagcttacgtagaacaaaaactcatctcagaagaggatctgaatagcgccgtcgaccatcatcatcatcatcattga

SEQ ID NO: 154 - protein, 802 aa, Artificial Sequence
  Description of Artificial Sequence:Thermococcus species 9degreesN-7 mutant DNA polymerase, 9degreesN mutant
MILDTDYITENGKPVIRVFKKENGEFKIEYDRTFEPYFYALLKDDSAIEDVKKVTAKRHGTVVKVKRAEKVQKKFLGRPIEVWKLYFNHPQDVPAIRDRIRAHPAVVDIYEYDIPFAKRYLIDKGLIPMEGDEELTMLAFAIATLYHEGEEFGTGPILMISYADGSEARVITWKKIDLPYVDVVSTEKEMIKRFLRVVREKDPDVLITYNGDNFDFAYLKKRCEELGIKFTLGRDGSEPKIQRMGDRFAVEVKGRIHFDLYPVIRRTINLPTYTLEAVYEAVFGKPKEKVYAEEIAQAWESGEGLERVARYSMEDAKVTYELGREFFPMEAQLSRSIGQSLWDVSRSSTGNLVEWFLLRKAYKRNELAPNKPDERELARRRGGYAGGYVKEPERGLWDNIVYLDFRSLYPSIIITHNVSPDTLNREGCKEYDVAPEVGHKFCKDFPGFIPSLLGDLLEERQKIKRKMKATVDPLEKKLLDYRQRLIKILANSFYGYYGYAKARWYCKECAESVTAWGREYIEMVIRELEEKFGFKVLYADTDGLHATIPGADAETVKKKAKEFLKYINPKLPGLLELEYEGFYVRGFFVTKKKYAVIDEEGKITTRGLEIVRRDWSEIAKETQARVLEAILKHGDVEEAVRIVKEVTEKLSKYEVPPEKLVIHEQITRDLRDYKATGPHVAVAKRLAARGVKIRPGTVISYIVLKGSGRIGDRAIPADEFDPTKHRYDAEYYIENQVLPAVERILKAFGYRKEDLRYQKTKQVGSGAWLKVKGKKGTEAYVEQKLISEEDLNSAVDHHHHHH

SEQ ID NO: 155 - DNA, 2409 bp, Artificial Sequence
  Description of Artificial Sequence:Thermococcus species 9degreesN-7 mutant DNA polymerase, 9degreesN mutant
atgattctcgataccgactacatcaccgagaacgggaagcccgtgataagggtcttcaagaaggagaacggcgagtttaaaatcgagtacgacagaaccttcgagccctacttctacgcccttctgaaggacgattctgcgatagaggacgtcaagaaggtaaccgcaaagaggcacggaacggttgtcaaggtgaagcgcgccgagaaggtgcagaagaagttcctcggcaggccgatagaggtctggaagctctacttcaaccatcctcaggacgtcccggcgattcgagacaggatacgcgcccaccccgctgtcgttgacatctacgagtacgacatacccttcgccaagcgctacctcatcgacaagggcctgattccgatggagggcgacgaggagcttacgatgctcgccttcgcgatcgcaaccctctatcacgagggcgaggagttcggaaccgggccgattctcatgataagctacgccgacgggagcgaggcgagggtgataacctggaagaagattgaccttccgtacgttgacgtcgtctcgaccgagaaggagatgattaagcgcttcctccgcgtcgtcagggagaaggaccccgacgtgctcatcacctacaacggcgacaacttcgacttcgcctacctgaagaagcgctgtgaggaactcggaataaagttcacactcggcagggacgggagcgagccgaagatacagcgaatgggcgaccgctttgccgttgaggtgaagggcaggattcacttcgacctctaccccgtcataaggcgcacgataaacctcccgacctacacccttgaggccgtttacgaggccgtctttggaaagcccaaggagaaggtttacgcagaggagatagcgcaggcctgggagagcggggagggccttgaaagggttgcaagatactcgatggaggacgctaaggtgacctacgagctgggaagggagttcttcccgatggaggcccagctttcgaggcttataggccagagcctctgggacgtctcgcgctcgagcaccggaaatttggtggagtggttcctcctgcggaaggcctacaagaggaacgagctcgccccaaacaagcccgacgagagggagctcgcgagacggcgcgggggctacgctggcgggtacgttaaggaaccagagcggggattgtgggacaacattgtgtatttagacttccgctcgctgtatccttcaatcatcataacccacaacgtctcgccggataccctcaaccgcgagggctgtaaagagtacgacgtcgcccctgaggttggacacaagttctgcaaggacttccccggcttcataccaagcctcctgggagatttgctcgaggagaggcagaagataaagcggaagatgaaggcaacggttgacccgctggagaagaaactcctcgattacaggttctggcttataaaaatcctcgccaacagcttctacggctactacggctacgccaaggcccggtggtactgcaaggagtgcgccgagagcgttacggcctggggaagggagtatatagaaatggttatccgggaactcgaagaaaaattcggttttaaagttctctatgccgatacagacggtctccatgctaccattcccggagcagacgctgaaacagtcaagaaaaaagcaaaggagttcttaaaatacattaatccaaaactgcccggcctgctcgaacttgagtacgagggcttctacgtgaggggcttcttcgtcacgaagaagaagtacgctgtgatagacgaggagggcaagataaccacgaggggtcttgagattgtgaggcgcgactggagcgagatagcgaaggagacccaggccagggtcttagaggcgatactcaagcacggtgacgtcgaggaggccgttaggatagtcaaggaagtgacggaaaagctgagcaagtatgaggtcccgcccgagaagctggtaatccacgagcagataacgcgcgatttgagggattacaaagccaccggcccgcacgttgccgttgcgaagaggctcgcggcgcgtggagtgaaaatccggcccggcacggtgataagctacatcgtcctaaagggctctggaaggataggcgacagggcgattccagctgatgagttcgacccgacgaagcaccgctacgatgcggaatactacatcgagaaccaggttctcccggcggtggagaggattctaaaagccttcggctatcggaaggaggatttgcgctaccagaagacgaagcaggtcggctcgggcgcgtggctgaaggtgaaggggaagaagggtaccgaagcttacgtagaacaaaaactcatctcagaagaggatctgaatagcgccgtcgaccatcatcatcatcatcattga

SEQ ID NO: 156 - protein, 802 aa, Artificial Sequence
  Description of Artificial Sequence:Thermococcus species 9degreesN-7 mutant DNA polymerase, 9degreesN mutant
MILDTDYITENGKPVIRVFKKENGEFKIEYDRTFEPYFYALLKDDSAIEDVKKVTAKRHGTVVKVKRAEKVQKKFLGRPIEVWKLYFNHPQDVPAIRDRIRAHPAVVDIYEYDIPFAKRYLIDKGLIPMEGDEELTMLAFAIATLYHEGEEFGTGPILMISYADGSEARVITWKKIDLPYVDVVSTEKEMIKRFLRVVREKDPDVLITYNGDNFDFAYLKKRCEELGIKFTLGRDGSEPKIQRMGDRFAVEVKGRIHFDLYPVIRRTINLPTYTLEAVYEAVFGKPKEKVYAEEIAQAWESGEGLERVARYSMEDAKVTYELGREFFPMEAQLSRLIGQSLWDVSRSSTGNLVEWFLLRKAYKRNELAPNKPDERELARRRGGYAGGYVKEPERGLWDNIVYLDFRSLYPSIIITHNVSPDTLNREGCKEYDVAPEVGHKFCKDFPGFIPSLLGDLLEERQKIKRKMKATVDPLEKKLLDYRFWLIKILANSFYGYYGYAKARWYCKECAESVTAWGREYIEMVIRELEEKFGFKVLYADTDGLHATIPGADAETVKKKAKEFLKYINPKLPGLLELEYEGFYVRGFFVTKKKYAVIDEEGKITTRGLEIVRRDWSEIAKETQARVLEAILKHGDVEEAVRIVKEVTEKLSKYEVPPEKLVIHEQITRDLRDYKATGPHVAVAKRLAARGVKIRPGTVISYIVLKGSGRIGDRAIPADEFDPTKHRYDAEYYIENQVLPAVERILKAFGYRKEDLRYQKTKQVGSGAWLKVKGKKGTEAYVEQKLISEEDLNSAVDHHHHHH

SEQ ID NO: 157 - DNA, 2409 bp, Artificial Sequence
  Description of Artificial Sequence:Thermococcus species 9degreesN-7 mutant DNA polymerase, 9degreesN mutant
atgattctcgataccgactacatcaccgagaacgggaagcccgtgataagggtcttcaagaaggagaacggcgagtttaaaatcgagtacgacagaaccttcgagccctacttctacgcccttctgaaggacgattctgcgatagaggacgtcaagaaggtaaccgcaaagaggcacggaacggttgtcaaggtgaagcgcgccgagaaggtgcagaagaagttcctcggcaggccgatagaggtctggaagctctacttcaaccatcctcaggacgtcccggcgattcgagacaggatacgcgcccaccccgctgtcgttgacatctacgagtacgacatacccttcgccaagcgctacctcatcgacaagggcctgattccgatggagggcgacgaggagcttacgatgctcgccttcgcgatcgcaaccctctatcacgagggcgaggagttcggaaccgggccgattctcatgataagctacgccgacgggagcgaggcgagggtgataacctggaagaagattgaccttccgtacgttgacgtcgtctcgaccgagaaggagatgattaagcgcttcctccgcgtcgtcagggagaaggaccccgacgtgctcatcacctacaacggcgacaacttcgacttcgcctacctgaagaagcgctgtgaggaactcggaataaagttcacactcggcagggacgggagcgagccgaagatacagcgaatgggcgaccgctttgccgttgaggtgaagggcaggattcacttcgacctctaccccgtcataaggcgcacgataaacctcccgacctacacccttgaggccgtttacgaggccgtctttggaaagcccaaggagaaggtttacgcagaggagatagcgcaggcctgggagagcggggagggccttgaaagggttgcaagatactcgatggaggacgctaaggtgacctacgagctgggaagggagttcttcccgattgaggcccagctttcgaggcttataggccagagcctctgggacgtctcgcgctcgagcaccggaaatttggtggagtggttcctcctgcggaaggcctacaagaggaacgagctcgccccaaacaagcccgacgagagggagctcgcgagacggcgcgggggctacgctggcgggtacgttaaggaaccagagcggggattgtgggacaacattgtgtatttagacttccgctcgctgtatccttcaatcatcataacccacaacgtctcgccggataccctcaaccgcgagggctgtaaagagtacgacgtcgcccctgaggttggacacaagttctgcaaggacttccccggcttcataccaagcctcctgggagatttgctcgaggagaggcagaagataaagcggaagatgaaggcaacggttgacccgctggagaagaaactcctcgattacaggcagtggttgatcaaaatcctcgccaacagcttctacggctactacggctacgccaaggcccggtggtactgcaaggagtgcgccgagagcgttacggcctggggaagggagtatatagaaatggttatccgggaactcgaagaaaaattcggttttaaagttctctatgccgatacagacggtctccatgctaccattcccggagcagacgctgaaacagtcaagaaaaaagcaaaggagttcttaaaatacattaatccaaaactgcccggcctgctcgaacttgagtacgagggcttctacgtgaggggcttcttcgtcacgaagaagaagtacgctgtgatagacgaggagggcaagataaccacgaggggtcttgagattgtgaggcgcgactggagcgagatagcgaaggagacccaggccagggtcttagaggcgatactcaagcacggtgacgtcgaggaggccgttaggatagtcaaggaagtgacggaaaagctgagcaagtatgaggtcccgcccgagaagctggtaatccacgagcagataacgcgcgatttgagggattacaaagccaccggcccgcacgttgccgttgcgaagaggctcgcggcgcgtggagtgaaaatccggcccggcacggtgataagctacatcgtcctaaagggctctggaaggataggcgacagggcgattccagctgatgagttcgacccgacgaagcaccgctacgatgcggaatactacatcgagaaccaggttctcccggcggtggagaggattctaaaagccttcggctatcggaaggaggatttgcgctaccagaagacgaagcaggtcggctcgggcgcgtggctgaaggtgaaggggaagaagggtaccgaagcttacgtagaacaaaaactcatctcagaagaggatctgaatagcgccgtcgaccatcatcatcatcatcattga

SEQ ID NO: 158 - protein, 802 aa, Artificial Sequence
  Description of Artificial Sequence:Thermococcus species 9degreesN-7 mutant DNA polymerase, 9degreesN mutant
MILDTDYITENGKPVIRVFKKENGEFKIEYDRTFEPYFYALLKDDSAIEDVKKVTAKRHGTVVKVKRAEKVQKKFLGRPIEVWKLYFNHPQDVPAIRDRIRAHPAVVDIYEYDIPFAKRYLIDKGLIPMEGDEELTMLAFAIATLYHEGEEFGTGPILMISYADGSEARVITWKKIDLPYVDVVSTEKEMIKRFLRVVREKDPDVLITYNGDNFDFAYLKKRCEELGIKFTLGRDGSEPKIQRMGDRFAVEVKGRIHFDLYPVIRRTINLPTYTLEAVYEAVFGKPKEKVYAEEIAQAWESGEGLERVARYSMEDAKVTYELGREFFPIEAQLSRLIGQSLWDVSRSSTGNLVEWFLLRKAYKRNELAPNKPDERELARRRGGYAGGYVKEPERGLWDNIVYLDFRSLYPSIIITHNVSPDTLNREGCKEYDVAPEVGHKFCKDFPGFIPSLLGDLLEERQKIKRKMKATVDPLEKKLLDYRQWLIKILANSFYGYYGYAKARWYCKECAESVTAWGREYIEMVIRELEEKFGFKVLYADTDGLHATIPGADAETVKKKAKEFLKYINPKLPGLLELEYEGFYVRGFFVTKKKYAVIDEEGKITTRGLEIVRRDWSEIAKETQARVLEAILKHGDVEEAVRIVKEVTEKLSKYEVPPEKLVIHEQITRDLRDYKATGPHVAVAKRLAARGVKIRPGTVISYIVLKGSGRIGDRAIPADEFDPTKHRYDAEYYIENQVLPAVERILKAFGYRKEDLRYQKTKQVGSGAWLKVKGKKGTEAYVEQKLISEEDLNSAVDHHHHHH

SEQ ID NO: 159 - DNA, 2409 bp, Artificial Sequence
  Description of Artificial Sequence:Thermococcus species 9degreesN-7 mutant DNA polymerase, 9degreesN mutant
atgattctcgataccgactacatcaccgagaacgggaagcccgtgataagggtcttcaagaaggagaacggcgagtttaaaatcgagtacgacagaaccttcgagccctacttctacgcccttctgaaggacgattctgcgatagaggacgtcaagaaggtaaccgcaaagaggcacggaacggttgtcaaggtgaagcgcgccgagaaggtgcagaagaagttcctcggcaggccgatagaggtctggaagctctacttcaaccatcctcaggacgtcccggcgattcgagacaggatacgcgcccaccccgctgtcgttgacatctacgagtacgacatacccttcgccaagcgctacctcatcgacaagggcctgattccgatggagggcgacgaggagcttacgatgctcgccttcgcgatcgcaaccctctatcacgagggcgaggagttcggaaccgggccgattctcatgataagctacgccgacgggagcgaggcgagggtgataacctggaagaagattgaccttccgtacgttgacgtcgtctcgaccgagaaggagatgattaagcgcttcctccgcgtcgtcagggagaaggaccccgacgtgctcatcacctacaacggcgacaacttcgacttcgcctacctgaagaagcgctgtgaggaactcggaataaagttcacactcggcagggacgggagcgagccgaagatacagcgaatgggcgaccgctttgccgttgaggtgaagggcaggattcacttcgacctctaccccgtcataaggcgcacgataaacctcccgacctacacccttgaggccgtttacgaggccgtctttggaaagcccaaggagaaggtttacgcagaggagatagcgcaggcctgggagagcggggagggccttgaaagggttgcaagatactcgatggaggacgctaaggtgacctacgagctgggaagggagttcttcccgatggaggcccagctttcgaggcttataggccagagcctctgggacgtctcgcgctcgagcaccggaaatttggtggagtggttcctcctgcggaaggcctacaagaggaacgagctcgccccaaacaagcccgacgagagggagctcgcgagacggcgcgggggctacgctggcgggtacgttaaggaaccagagcggggattgtgggacaacattgtgtatttagacttccgctcgctgtatccttcaatcatcataacccacaacgtctcgccggataccctcaaccgcgagggctgtaaagagtacgacgtcgcccctgaggttggacacaagttctgcaaggacttccccggcttcataccaagcctcctgggagatttgctcgaggagaggcagaagataaagcggaagatgaaggcaacggttgacccgctggagaagaaactcctcgattacaggcagaggaaaatcaaaatcctcgccaacagcttctacggctactacggctacgccaaggcccggtggtactgcaaggagtgcgccgagagcgttacggcctggggaagggagtatatagaaatggttatccgggaactcgaagaaaaattcggttttaaagttctctatgccgatacagacggtctccatgctaccattcccggagcagacgctgaaacagtcaagaaaaaagcaaaggagttcttaaaatacattaatccaaaactgcccggcctgctcgaacttgagtacgagggcttctacgtgaggggcttcttcgtcacgaagaagaagtacgctgtgatagacgaggagggcaagataaccacgaggggtcttgagattgtgaggcgcgactggagcgagatagcgaaggagacccaggccagggtcttagaggcgatactcaagcacggtgacgtcgaggaggccgttaggatagtcaaggaagtgacggaaaagctgagcaagtatgaggtcccgcccgagaagctggtaatccacgagcagataacgcgcgatttgagggattacaaagccaccggcccgcacgttgccgttgcgaagaggctcgcggcgcgtggagtgaaaatccggcccggcacggtgataagctacatcgtcctaaagggctctggaaggataggcgacagggcgattccagctgatgagttcgacccgacgaagcaccgctacgatgcggaatactacatcgagaaccaggttctcccggcggtggagaggattctaaaagccttcggctatcggaaggaggatttgcgctaccagaagacgaagcaggtcggctcgggcgcgtggctgaaggtgaaggggaagaagggtaccgaagcttacgtagaacaaaaactcatctcagaagaggatctgaatagcgccgtcgaccatcatcatcatcatcattga

SEQ ID NO: 160 - protein, 802 aa, Artificial Sequence
  Description of Artificial Sequence:Thermococcus species 9degreesN-7 mutant DNA polymerase, 9degreesN mutant
MILDTDYITENGKPVIRVFKKENGEFKIEYDRTFEPYFYALLKDDSAIEDVKKVTAKRHGTVVKVKRAEKVQKKFLGRPIEVWKLYFNHPQDVPAIRDRIRAHPAVVDIYEYDIPFAKRYLIDKGLIPMEGDEELTMLAFAIATLYHEGEEFGTGPILMISYADGSEARVITWKKIDLPYVDVVSTEKEMIKRFLRVVREKDPDVLITYNGDNFDFAYLKKRCEELGIKFTLGRDGSEPKIQRMGDRFAVEVKGRIHFDLYPVIRRTINLPTYTLEAVYEAVFGKPKEKVYAEEIAQAWESGEGLERVARYSMEDAKVTYELGREFFPMEAQLSRLIGQSLWDVSRSSTGNLVEWFLLRKAYKRNELAPNKPDERELARRRGGYAGGYVKEPERGLWDNIVYLDFRSLYPSIIITHNVSPDTLNREGCKEYDVAPEVGHKFCKDFPGFIPSLLGDLLEERQKIKRKMKATVDPLEKKLLDYRQRKIKILANSFYGYYGYAKARWYCKECAESVTAWGREYIEMVIRELEEKFGFKVLYADTDGLHATIPGADAETVKKKAKEFLKYINPKLPGLLELEYEGFYVRGFFVTKKKYAVIDEEGKITTRGLEIVRRDWSEIAKETQARVLEAILKHGDVEEAVRIVKEVTEKLSKYEVPPEKLVIHEQITRDLRDYKATGPHVAVAKRLAARGVKIRPGTVISYIVLKGSGRIGDRAIPADEFDPTKHRYDAEYYIENQVLPAVERILKAFGYRKEDLRYQKTKQVGSGAWLKVKGKKGTEAYVEQKLISEEDLNSAVDHHHHHH

SEQ ID NO: 161 - DNA, 2409 bp, Artificial Sequence
  Description of Artificial Sequence:Thermococcus species 9degreesN-7 mutant DNA polymerase, 9degreesN mutant
atgattctcgataccgactacatcaccgagaacgggaagcccgtgataagggtcttcaagaaggagaacggcgagtttaaaatcgagtacgacagaaccttcgagccctacttctacgcccttctgaaggacgattctgcgatagaggacgtcaagaaggtaaccgcaaagaggcacggaacggttgtcaaggtgaagcgcgccgagaaggtgcagaagaagttcctcggcaggccgatagaggtctggaagctctacttcaaccatcctcaggacgtcccggcgattcgagacaggatacgcgcccaccccgctgtcgttgacatctacgagtacgacatacccttcgccaagcgctacctcatcgacaagggcctgattccgatggagggcgacgaggagcttacgatgctcgccttcgcgatcgcaaccctctatcacgagggcgaggagttcggaaccgggccgattctcatgataagctacgccgacgggagcgaggcgagggtgataacctggaagaagattgaccttccgtacgttgacgtcgtctcgaccgagaaggagatgattaagcgcttcctccgcgtcgtcagggagaaggaccccgacgtgctcatcacctacaacggcgacaacttcgacttcgcctacctgaagaagcgctgtgaggaactcggaataaagttcacactcggcagggacgggagcgagccgaagatacagcgaatgggcgaccgctttgccgttgaggtgaagggcaggattcacttcgacctctaccccgtcataaggcgcacgataaacctcccgacctacacccttgaggccgtttacgaggccgtctttggaaagcccaaggagaaggtttacgcagaggagatagcgcaggcctgggagagcggggagggccttgaaagggttgcaagatactcgatggaggacgctaaggtgacctacgagctgggaagggagttcttcccgatggaggcccagctttcgaggcttataggccagagcctctgggacgtctcgcgctcgagcaccggaaatttggtggagtggttcctcctgcggaaggcctacaagaggaacgagctcgccccaaacaagcccgacgagagggagctcgcgagacggcgcgggggctacgctggcgggtacgttaaggaaccagagcggggattgtgggacaacattgtgtatttagacttccgctcgctgtatccttcaatcatcataacccacaacgtctcgccggataccctcaaccgcgagggctgtaaagagtacgacgtcgcccctgaggttggacacaagttctgcaaggacttccccggcttcataccaagcctcctgggagatttgctcgaggagaggcagaagataaagcggaagatgaaggcaacggttgacccgctggagaagaaactcctcgattacaggcagaggcaaatcaaaatcctcgccaacagcttctacggctactacggctacgccaaggcccggtggtactgcaaggagtgcgccgagagcgttacggcctggggaagggagtatatagaaatggttatccgggaactcgaagaaaaattcggttttaaagttctctatgccgatacagacggtctccatgctaccattcccggagcagacgctgaaacagtcaagaaaaaagcaaaggagttcttaaaatacattaatccaaaactgcccggcctgctcgaacttgagtacgagggcttctacgtgaggggcttcttcgtcacgaagaagaagtacgctgtgatagacgaggagggcaagataaccacgaggggtcttgagattgtgaggcgcgactggagcgagatagcgaaggagacccaggccagggtcttagaggcgatactcaagcacggtgacgtcgaggaggccgttaggatagtcaaggaagtgacggaaaagctgagcaagtatgaggtcccgcccgagaagctggtaatccacgagcagataacgcgcgatttgagggattacaaagccaccggcccgcacgttgccgttgcgaagaggctcgcggcgcgtggagtgaaaatccggcccggcacggtgataagctacatcgtcctaaagggctctggaaggataggcgacagggcgattccagctgatgagttcgacccgacgaagcaccgctacgatgcggaatactacatcgagaaccaggttctcccggcggtggagaggattctaaaagccttcggctatcggaaggaggatttgcgctaccagaagacgaagcaggtcggctcgggcgcgtggctgaaggtgaaggggaagaagggtaccgaagcttacgtagaacaaaaactcatctcagaagaggatctgaatagcgccgtcgaccatcatcatcatcatcattga

SEQ ID NO: 162 - protein, 802 aa, Artificial Sequence
  Description of Artificial Sequence:Thermococcus species 9degreesN-7 mutant DNA polymerase, 9degreesN mutant
MILDTDYITENGKPVIRVFKKENGEFKIEYDRTFEPYFYALLKDDSAIEDVKKVTAKRHGTVVKVKRAEKVQKKFLGRPIEVWKLYFNHPQDVPAIRDRIRAHPAVVDIYEYDIPFAKRYLIDKGLIPMEGDEELTMLAFAIATLYHEGEEFGTGPILMISYADGSEARVITWKKIDLPYVDVVSTEKEMIKRFLRVVREKDPDVLITYNGDNFDFAYLKKRCEELGIKFTLGRDGSEPKIQRMGDRFAVEVKGRIHFDLYPVIRRTINLPTYTLEAVYEAVFGKPKEKVYAEEIAQAWESGEGLERVARYSMEDAKVTYELGREFFPMEAQLSRLIGQSLWDVSRSSTGNLVEWFLLRKAYKRNELAPNKPDERELARRRGGYAGGYVKEPERGLWDNIVYLDFRSLYPSIIITHNVSPDTLNREGCKEYDVAPEVGHKFCKDFPGFIPSLLGDLLEERQKIKRKMKATVDPLEKKLLDYRQRQIKILANSFYGYYGYAKARWYCKECAESVTAWGREYIEMVIRELEEKFGFKVLYADTDGLHATIPGADAETVKKKAKEFLKYINPKLPGLLELEYEGFYVRGFFVTKKKYAVIDEEGKITTRGLEIVRRDWSEIAKETQARVLEAILKHGDVEEAVRIVKEVTEKLSKYEVPPEKLVIHEQITRDLRDYKATGPHVAVAKRLAARGVKIRPGTVISYIVLKGSGRIGDRAIPADEFDPTKHRYDAEYYIENQVLPAVERILKAFGYRKEDLRYQKTKQVGSGAWLKVKGKKGTEAYVEQKLISEEDLNSAVDHHHHHH

SEQ ID NO: 163 - DNA, 2448 bp, Artificial Sequence
  Description of Artificial Sequence:Thermococcus species 9degreesN-7 mutant DNA polymerase, 9degreesN mutant
atgattctcgataccgactacatcaccgagaacgggaagcccgtgataagggtcttcaagaaggagaacggcgagtttaaaatcgagtacgacagaaccttcgagccctacttctacgcccttctgaaggacgattctgcgatagaggacgtcaagaaggtaaccgcaaagaggcacggaacggttgtcaaggtgaagcgcgccgagaaggtgcagaagaagttcctcggcaggccgatagaggtctggaagctctacttcaaccatcctcaggacgtcccggcgattcgagacaggatacgcgcccaccccgctgtcgttgacatctacgagtacgacatacccttcgccaagcgctacctcatcgacaagggcctgattccgatggagggcgacgaggagcttacgatgctcgccttcgcgatcgcaaccctctatcacgagggcgaggagttcggaaccgggccgattctcatgataagctacgccgacgggagcgaggcgagggtgataacctggaagaagattgaccttccgtacgttgacgtcgtctcgaccgagaaggagatgattaagcgcttcctccgcgtcgtcagggagaaggaccccgacgtgctcatcacctacaacggcgacaacttcgacttcgcctacctgaagaagcgctgtgaggaactcggaataaagttcacactcggcagggacgggagcgagccgaagatacagcgaatgggcgaccgctttgccgttgaggtgaagggcaggattcacttcgacctctaccccgtcataaggcgcacgataaacctcccgacctacacccttgaggccgtttacgaggccgtctttggaaagcccaaggagaaggtttacgcagaggagatagcgcaggcctgggagagcggggagggccttgaaagggttgcaagatactcgatggaggacgctaaggtgacctacgagctgggaagggagttcttcccgatggaggcccagctttcgaggcttataggccagagcctctgggacgtctcgcgctcgagcaccggaaatttggtggagtggttcctcctgcggaaggcctacaagaggaacgagctcgccccaaacaagcccgacgagagggagctcgcgagacggcgcgggggctacgctggcgggtacgttaaggaaccagagcggggattgtgggacaacattgtgtatttagacttccgctcgctgtatccttcaatcatcataacccacaacgtctcgccggataccctcaaccgcgagggctgtaaagagtacgacgtcgcccctgaggttggacacaagttctgcaaggacttccccggcttcataccaagcctcctgggagatttgctcgaggagaggcagaagataaagcggaagatgaaggcaacggttgacccgctggagaagaaactcctcgattacaggcagaggcccatcaaaatcctcgccaacctcgattacaggcagaggctcatcaaaatcctcgccaacagcttctacggctactacggctacgccaaggcccggtggtactgcaaggagtgcgccgagagcgttacggcctggggaagggagtatatagaaatggttatccgggaactcgaagaaaaattcggttttaaagttctctatgccgatacagacggtctccatgctaccattcccggagcagacgctgaaacagtcaagaaaaaagcaaaggagttcttaaaatacattaatccaaaactgcccggcctgctcgaacttgagtacgagggcttctacgtgaggggcttcttcgtcacgaagaagaagtacgctgtgatagacgaggagggcaagataaccacgaggggtcttgagattgtgaggcgcgactggagcgagatagcgaaggagacccaggccagggtcttagaggcgatactcaagcacggtgacgtcgaggaggccgttaggatagtcaaggaagtgacggaaaagctgagcaagtatgaggtcccgcccgagaagctggtaatccacgagcagataacgcgcgatttgagggattacaaagccaccggcccgcacgttgccgttgcgaagaggctcgcggcgcgtggagtgaaaatccggcccggcacggtgataagctacatcgtcctaaagggctctggaaggataggcgacagggcgattccagctgatgagttcgacccgacgaagcaccgctacgatgcggaatactacatcgagaaccaggttctcccggcggtggagaggattctaaaagccttcggctatcggaaggaggatttgcgctaccagaagacgaagcaggtcggctcgggcgcgtggctgaaggtgaaggggaagaagggtaccgaagcttacgtagaacaaaaactcatctcagaagaggatctgaatagcgccgtcgaccatcatcatcatcatcattga

SEQ ID NO: 164 - protein, 815 aa, Artificial Sequence
  Description of Artificial Sequence:Thermococcus species 9degreesN-7 mutant DNA polymerase, 9degreesN mutant
MILDTDYITENGKPVIRVFKKENGEFKIEYDRTFEPYFYALLKDDSAIEDVKKVTAKRHGTVVKVKRAEKVQKKFLGRPIEVWKLYFNHPQDVPAIRDRIRAHPAVVDIYEYDIPFAKRYLIDKGLIPMEGDEELTMLAFAIATLYHEGEEFGTGPILMISYADGSEARVITWKKIDLPYVDVVSTEKEMIKRFLRVVREKDPDVLITYNGDNFDFAYLKKRCEELGIKFTLGRDGSEPKIQRMGDRFAVEVKGRIHFDLYPVIRRTINLPTYTLEAVYEAVFGKPKEKVYAEEIAQAWESGEGLERVARYSMEDAKVTYELGREFFPMEAQLSRLIGQSLWDVSRSSTGNLVEWFLLRKAYKRNELAPNKPDERELARRRGGYAGGYVKEPERGLWDNIVYLDFRSLYPSIIITHNVSPDTLNREGCKEYDVAPEVGHKFCKDFPGFIPSLLGDLLEERQKIKRKMKATVDPLEKKLLDYRQRPIKILANLDYRQRLIKILANSFYGYYGYAKARWYCKECAESVTAWGREYIEMVIRELEEKFGFKVLYADTDGLHATIPGADAETVKKKAKEFLKYINPKLPGLLELEYEGFYVRGFFVTKKKYAVIDEEGKITTRGLEIVRRDWSEIAKETQARVLEAILKHGDVEEAVRIVKEVTEKLSKYEVPPEKLVIHEQITRDLRDYKATGPHVAVAKRLAARGVKIRPGTVISYIVLKGSGRIGDRAIPADEFDPTKHRYDAEYYIENQVLPAVERILKAFGYRKEDLRYQKTKQVGSGAWLKVKGKKGTEAYVEQKLISEEDLNSAVDHHHHHH

SEQ ID NO: 165 - DNA, 2409 bp, Artificial Sequence
  Description of Artificial Sequence:Thermococcus species 9degreesN-7 mutant DNA polymerase, 9degreesN mutant
atgattctcgataccgactacatcaccgagaacgggaagcccgtgataagggtcttcaagaaggagaacggcgagtttaaaatcgagtacgacagaaccttcgagccctacttctacgcccttctgaaggacgattctgcgatagaggacgtcaagaaggtaaccgcaaagaggcacggaacggttgtcaaggtgaagcgcgccgagaaggtgcagaagaagttcctcggcaggccgatagaggtctggaagctctacttcaaccatcctcaggacgtcccggcgattcgagacaggatacgcgcccaccccgctgtcgttgacatctacgagtacgacatacccttcgccaagcgctacctcatcgacaagggcctgattccgatggagggcgacgaggagcttacgatgctcgccttcgcgatcgcaaccctctatcacgagggcgaggagttcggaaccgggccgattctcatgataagctacgccgacgggagcgaggcgagggtgataacctggaagaagattgaccttccgtacgttgacgtcgtctcgaccgagaaggagatgattaagcgcttcctccgcgtcgtcagggagaaggaccccgacgtgctcatcacctacaacggcgacaacttcgacttcgcctacctgaagaagcgctgtgaggaactcggaataaagttcacactcggcagggacgggagcgagccgaagatacagcgaatgggcgaccgctttgccgttgaggtgaagggcaggattcacttcgacctctaccccgtcataaggcgcacgataaacctcccgacctacacccttgaggccgtttacgaggccgtctttggaaagcccaaggagaaggtttacgcagaggagatagcgcaggcctgggagagcggggagggccttgaaagggttgcaagatactcgatggaggacgctaaggtgacctacgagctgggaagggagttcttcccgatggaggcccagctttcgaggcttataggccagagcctctgggacgtctcgcgctcgagcaccggaaatttggtggagtggttcctcctgcggaaggcctacaagaggaacgagctcgccccaaacaagcccgacgagagggagctcgcgagacggcgcgggggctacgctggcgggtacgttaaggaaccagagcggggattgtgggacaacattgtgtatttagacttccgctcgctgtatccttcaatcatcataacccacaacgtctcgccggataccctcaaccgcgagggctgtaaagagtacgacgtcgcccctgaggttggacacaagttctgcaaggacttccccggcttcataccaagcctcctgggagatttgctcgaggagaggcagaagataaagcggaagatgaaggcaacggttgacccgctggagaagaaactcctcgtgtacaggcagtggcttataaaaatcctcgccaacagcttctacggctacaagggctacgccaaggcccggtggtactgcaaggagtgcgccgagagcgttacggcctggggaagggagtatatagaaatggttatccgggaactcgaagaaaaattcggttttaaagttctctatgccgatacagacggtctccatgctaccattcccggagcagacgctgaaacagtcaagaaaaaagcaaaggagttcttaaaatacattaatccaaaactgcccggcctgctcgaacttgagtacgagggcttctacgtgaggggcttcttcgtcacgaagaagaagtacgctgtgatagacgaggagggcaagataaccacgaggggtcttgagattgtgaggcgcgactggagcgagatagcgaaggagacccaggccagggtcttagaggcgatactcaagcacggtgacgtcgaggaggccgttaggatagtcaaggaagtgacggaaaagctgagcaagtatgaggtcccgcccgagaagctggtaatccacgagcagataacgcgcgatttgagggattacaaagccaccggcccgcacgttgccgttgcgaagaggctcgcggcgcgtggagtgaaaatccggcccggcacggtgataagctacatcgtcctaaagggctctggaaggataggcgacagggcgattccagctgatgagttcgacccgacgaagcaccgctacgatgcggaatactacatcgagaaccaggttctcccggcggtggagaggattctaaaagccttcggctatcggaaggaggatttgcgctaccagaagacgaagcaggtcggctcgggcgcgtggctgaaggtgaaggggaagaagggtaccgaagcttacgtagaacaaaaactcatctcagaagaggatctgaatagcgccgtcgaccatcatcatcatcatcattga

SEQ ID NO: 166 - protein, 802 aa, Artificial Sequence
  Description of Artificial Sequence:Thermococcus species 9degreesN-7 mutant DNA polymerase, 9degreesN mutant
MILDTDYITENGKPVIRVFKKENGEFKIEYDRTFEPYFYALLKDDSAIEDVKKVTAKRHGTVVKVKRAEKVQKKFLGRPIEVWKLYFNHPQDVPAIRDRIRAHPAVVDIYEYDIPFAKRYLIDKGLIPMEGDEELTMLAFAIATLYHEGEEFGTGPILMISYADGSEARVITWKKIDLPYVDVVSTEKEMIKRFLRVVREKDPDVLITYNGDNFDFAYLKKRCEELGIKFTLGRDGSEPKIQRMGDRFAVEVKGRIHFDLYPVIRRTINLPTYTLEAVYEAVFGKPKEKVYAEEIAQAWESGEGLERVARYSMEDAKVTYELGREFFPMEAQLSRLIGQSLWDVSRSSTGNLVEWFLLRKAYKRNELAPNKPDERELARRRGGYAGGYVKEPERGLWDNIVYLDFRSLYPSIIITHNVSPDTLNREGCKEYDVAPEVGHKFCKDFPGFIPSLLGDLLEERQKIKRKMKATVDPLEKKLLVYRQWLIKILANSFYGYKGYAKARWYCKECAESVTAWGREYIEMVIRELEEKFGFKVLYADTDGLHATIPGADAETVKKKAKEFLKYINPKLPGLLELEYEGFYVRGFFVTKKKYAVIDEEGKITTRGLEIVRRDWSEIAKETQARVLEAILKHGDVEEAVRIVKEVTEKLSKYEVPPEKLVIHEQITRDLRDYKATGPHVAVAKRLAARGVKIRPGTVISYIVLKGSGRIGDRAIPADEFDPTKHRYDAEYYIENQVLPAVERILKAFGYRKEDLRYQKTKQVGSGAWLKVKGKKGTEAYVEQKLISEEDLNSAVDHHHHHH

SEQ ID NO: 167 - DNA, 2409 bp, Artificial Sequence
  Description of Artificial Sequence:Thermococcus species 9degreesN-7 mutant DNA polymerase, 9degreesN mutant
atgattctcgataccgactacatcaccgagaacgggaagcccgtgataagggtcttcaagaaggagaacggcgagtttaaaatcgagtacgacagaaccttcgagccctacttctacgcccttctgaaggacgattctgcgatagaggacgtcaagaaggtaaccgcaaagaggcacggaacggttgtcaaggtgaagcgcgccgagaaggtgcagaagaagttcctcggcaggccgatagaggtctggaagctctacttcaaccatcctcaggacgtcccggcgattcgagacaggatacgcgcccaccccgctgtcgttgacatctacgagtacgacatacccttcgccaagcgctacctcatcgacaagggcctgattccgatggagggcgacgaggagcttacgatgctcgccttcgcgatcgcaaccctctatcacgagggcgaggagttcggaaccgggccgattctcatgataagctacgccgacgggagcgaggcgagggtgataacctggaagaagattgaccttccgtacgttgacgtcgtctcgaccgagaaggagatgattaagcgcttcctccgcgtcgtcagggagaaggaccccgacgtgctcatcacctacaacggcgacaacttcgacttcgcctacctgaagaagcgctgtgaggaactcggaataaagttcacactcggcagggacgggagcgagccgaagatacagcgaatgggcgaccgctttgccgttgaggtgaagggcaggattcacttcgacctctaccccgtcataaggcgcacgataaacctcccgacctacacccttgaggccgtttacgaggccgtctttggaaagcccaaggagaaggtttacgcagaggagatagcgcaggcctgggagagcggggagggccttgaaagggttgcaagatactcgatggaggacgctaaggtgacctacgagctgggaagggagttcttcccgatggaggcccagctttcgaggcttataggccagagcctctgggacgtctcgcgctcgagcaccggaaatttggtggagtggttcctcctgcggaaggcctacaagaggaacgagctcgccccaaacaagcccgacgagagggagctcgcgagacggcgcgggggctacgctggcgggtacgttaaggaaccagagcggggattgtgggacaacattgtgtatttagacttccgctcgctgtatccttcaatcatcataacccacaacgtctcgccggataccctcaaccgcgagggctgtaaagagtacgacgtcgcccctgaggttggacacaagttctgcaaggacttccccggcttcataccaagcctcctgggagatttgctcgaggagaggcagaagataaagcggaagatgaaggcaacggttgacccgctggagaagaaactcctcgattacaggatgtggcttataaaaatcctcgccaacagctgttacggctactacggctacgccaaggcccggtggtactgcaaggagtgcgccgagagcgttacggcctggggaagggagtatatagaaatggttatccgggaactcgaagaaaaattcggttttaaagttctctatgccgatacagacggtctccatgctaccattcccggagcagacgctgaaacagtcaagaaaaaagcaaaggagttcttaaaatacattaatccaaaactgcccggcctgctcgaacttgagtacgagggcttctacgtgaggggcttcttcgtcacgaagaagaagtacgctgtgatagacgaggagggcaagataaccacgaggggtcttgagattgtgaggcgcgactggagcgagatagcgaaggagacccaggccagggtcttagaggcgatactcaagcacggtgacgtcgaggaggccgttaggatagtcaaggaagtgacggaaaagctgagcaagtatgaggtcccgcccgagaagctggtaatccacgagcagataacgcgcgatttgagggattacaaagccaccggcccgcacgttgccgttgcgaagaggctcgcggcgcgtggagtgaaaatccggcccggcacggtgataagctacatcgtcctaaagggctctggaaggataggcgacagggcgattccagctgatgagttcgacccgacgaagcaccgctacgatgcggaatactacatcgagaaccaggttctcccggcggtggagaggattctaaaagccttcggctatcggaaggaggatttgcgctaccagaagacgaagcaggtcggctcgggcgcgtggctgaaggtgaaggggaagaagggtaccgaagcttacgtagaacaaaaactcatctcagaagaggatctgaatagcgccgtcgaccatcatcatcatcatcattga

SEQ ID NO: 168 - protein, 802 aa, Artificial Sequence
  Description of Artificial Sequence:Thermococcus species 9degreesN-7 mutant DNA polymerase, 9degreesN mutant
MILDTDYITENGKPVIRVFKKENGEFKIEYDRTFEPYFYALLKDDSAIEDVKKVTAKRHGTVVKVKRAEKVQKKFLGRPIEVWKLYFNHPQDVPAIRDRIRAHPAVVDIYEYDIPFAKRYLIDKGLIPMEGDEELTMLAFAIATLYHEGEEFGTGPILMISYADGSEARVITWKKIDLPYVDVVSTEKEMIKRFLRVVREKDPDVLITYNGDNFDFAYLKKRCEELGIKFTLGRDGSEPKIQRMGDRFAVEVKGRIHFDLYPVIRRTINLPTYTLEAVYEAVFGKPKEKVYAEEIAQAWESGEGLERVARYSMEDAKVTYELGREFFPMEAQLSRLIGQSLWDVSRSSTGNLVEWFLLRKAYKRNELAPNKPDERELARRRGGYAGGYVKEPERGLWDNIVYLDFRSLYPSIIITHNVSPDTLNREGCKEYDVAPEVGHKFCKDFPGFIPSLLGDLLEERQKIKRKMKATVDPLEKKLLDYRMWLIKILANSCYGYYGYAKARWYCKECAESVTAWGREYIEMVIRELEEKFGFKVLYADTDGLHATIPGADAETVKKKAKEFLKYINPKLPGLLELEYEGFYVRGFFVTKKKYAVIDEEGKITTRGLEIVRRDWSEIAKETQARVLEAILKHGDVEEAVRIVKEVTEKLSKYEVPPEKLVIHEQITRDLRDYKATGPHVAVAKRLAARGVKIRPGTVISYIVLKGSGRIGDRAIPADEFDPTKHRYDAEYYIENQVLPAVERILKAFGYRKEDLRYQKTKQVGSGAWLKVKGKKGTEAYVEQKLISEEDLNSAVDHHHHHH

SEQ ID NO: 169 - DNA, 2409 bp, Artificial Sequence
  Description of Artificial Sequence:Thermococcus species 9degreesN-7 mutant DNA polymerase, 9degreesN mutant
atgattctcgataccgactacatcaccgagaacgggaagcccgtgataagggtcttcaagaaggagaacggcgagtttaaaatcgagtacgacagaaccttcgagccctacttctacgcccttctgaaggacgattctgcgatagaggacgtcaagaaggtaaccgcaaagaggcacggaacggttgtcaaggtgaagcgcgccgagaaggtgcagaagaagttcctcggcaggccgatagaggtctggaagctctacttcaaccatcctcaggacgtcccggcgattcgagacaggatacgcgcccaccccgctgtcgttgacatctacgagtacgacatacccttcgccaagcgctacctcatcgacaagggcctgattccgatggagggcgacgaggagcttacgatgctcgccttcgcgatcgcaaccctctatcacgagggcgaggagttcggaaccgggccgattctcatgataagctacgccgacgggagcgaggcgagggtgataacctggaagaagattgaccttccgtacgttgacgtcgtctcgaccgagaaggagatgattaagcgcttcctccgcgtcgtcagggagaaggaccccgacgtgctcatcacctacaacggcgacaacttcgacttcgcctacctgaagaagcgctgtgaggaactcggaataaagttcacactcggcagggacgggagcgagccgaagatacagcgaatgggcgaccgctttgccgttgaggtgaagggcaggattcacttcgacctctaccccgtcataaggcgcacgataaacctcccgacctacacccttgaggccgtttacgaggccgtctttggaaagcccaaggagaaggtttacgcagaggagatagcgcaggcctgggagagcggggagggccttgaaagggttgcaagatactcgatggaggacgctaaggtgacctacgagctgggaagggagttcttcccgatggaggcccagctttcgaggcttataggccagagcctctgggacgtctcgcgctcgagcaccggaaatttggtggagtggttcctcctgcggaaggcctacaagaggaacgagctcgccccaaacaagcccgacgagagggagctcgcgagacggcgcgggggctacgctggcgggtacgttaaggaaccagagcggggattgtgggacaacattgtgtatttagacttccgctcgatgtatccttcaatcatcataacccacaacgtctcgccggataccctcaaccgcgagggctgtaaagagtacgacgtcgcccctgaggttggacacaagttctgcaaggacttccccggcttcataccaagcctcctgggagatttgctcgaggagaggcagaagataaagcggaagatgaaggcaacggttgacccgctggagaagaaactcctcgattacaggatgtggcttataaaaatcctcgccaacagcttctacggctactacggctacgccaaggcccggtggtactgcaaggagtgcgccgagagcgttacggcctggggaagggagtatatagaaatggttatccgggaactcgaagaaaaattcggttttaaagttctctatgccgatacagacggtctccatgctaccattcccggagcagacgctgaaacagtcaagaaaaaagcaaaggagttcttaaaatacattaatccaaaactgcccggcctgctcgaacttgagtacgagggcttctacgtgaggggcttcttcgtcacgaagaagaagtacgctgtgatagacgaggagggcaagataaccacgaggggtcttgagattgtgaggcgcgactggagcgagatagcgaaggagacccaggccagggtcttagaggcgatactcaagcacggtgacgtcgaggaggccgttaggatagtcaaggaagtgacggaaaagctgagcaagtatgaggtcccgcccgagaagctggtaatccacgagcagataacgcgcgatttgagggattacaaagccaccggcccgcacgttgccgttgcgaagaggctcgcggcgcgtggagtgaaaatccggcccggcacggtgataagctacatcgtcctaaagggctctggaaggataggcgacagggcgattccagctgatgagttcgacccgacgaagcaccgctacgatgcggaatactacatcgagaaccaggttctcccggcggtggagaggattctaaaagccttcggctatcggaaggaggatttgcgctaccagaagacgaagcaggtcggctcgggcgcgtggctgaaggtgaaggggaagaagggtaccgaagcttacgtagaacaaaaactcatctcagaagaggatctgaatagcgccgtcgaccatcatcatcatcatcattga

SEQ ID NO: 170 - protein, 802 aa, Artificial Sequence
  Description of Artificial Sequence:Thermococcus species 9degreesN-7 mutant DNA polymerase, 9degreesN mutant
MILDTDYITENGKPVIRVFKKENGEFKIEYDRTFEPYFYALLKDDSAIEDVKKVTAKRHGTVVKVKRAEKVQKKFLGRPIEVWKLYFNHPQDVPAIRDRIRAHPAVVDIYEYDIPFAKRYLIDKGLIPMEGDEELTMLAFAIATLYHEGEEFGTGPILMISYADGSEARVITWKKIDLPYVDVVSTEKEMIKRFLRVVREKDPDVLITYNGDNFDFAYLKKRCEELGIKFTLGRDGSEPKIQRMGDRFAVEVKGRIHFDLYPVIRRTINLPTYTLEAVYEAVFGKPKEKVYAEEIAQAWESGEGLERVARYSMEDAKVTYELGREFFPMEAQLSRLIGQSLWDVSRSSTGNLVEWFLLRKAYKRNELAPNKPDERELARRRGGYAGGYVKEPERGLWDNIVYLDFRSMYPSIIITHNVSPDTLNREGCKEYDVAPEVGHKFCKDFPGFIPSLLGDLLEERQKIKRKMKATVDPLEKKLLDYRMWLIKILANSFYGYYGYAKARWYCKECAESVTAWGREYIEMVIRELEEKFGFKVLYADTDGLHATIPGADAETVKKKAKEFLKYINPKLPGLLELEYEGFYVRGFFVTKKKYAVIDEEGKITTRGLEIVRRDWSEIAKETQARVLEAILKHGDVEEAVRIVKEVTEKLSKYEVPPEKLVIHEQITRDLRDYKATGPHVAVAKRLAARGVKIRPGTVISYIVLKGSGRIGDRAIPADEFDPTKHRYDAEYYIENQVLPAVERILKAFGYRKEDLRYQKTKQVGSGAWLKVKGKKGTEAYVEQKLISEEDLNSAVDHHHHHH

SEQ ID NO: 171 - DNA, 2409 bp, Artificial Sequence
  Description of Artificial Sequence:Thermococcus species 9degreesN-7 mutant DNA polymerase, 9degreesN mutant
atgattctcgataccgactacatcaccgagaacgggaagcccgtgataagggtcttcaagaaggagaacggcgagtttaaaatcgagtacgacagaaccttcgagccctacttctacgcccttctgaaggacgattctgcgatagaggacgtcaagaaggtaaccgcaaagaggcacggaacggttgtcaaggtgaagcgcgccgagaaggtgcagaagaagttcctcggcaggccgatagaggtctggaagctctacttcaaccatcctcaggacgtcccggcgattcgagacaggatacgcgcccaccccgctgtcgttgacatctacgagtacgacatacccttcgccaagcgctacctcatcgacaagggcctgattccgatggagggcgacgaggagcttacgatgctcgccttcgcgatcgcaaccctctatcacgagggcgaggagttcggaaccgggccgattctcatgataagctacgccgacgggagcgaggcgagggtgataacctggaagaagattgaccttccgtacgttgacgtcgtctcgaccgagaaggagatgattaagcgcttcctccgcgtcgtcagggagaaggaccccgacgtgctcatcacctacaacggcgacaacttcgacttcgcctacctgaagaagcgctgtgaggaactcggaataaagttcacactcggcagggacgggagcgagccgaagatacagcgaatgggcgaccgctttgccgttgaggtgaagggcaggattcacttcgacctctaccccgtcataaggcgcacgataaacctcccgacctacacccttgaggccgtttacgaggccgtctttggaaagcccaaggagaaggtttacgcagaggagatagcgcaggcctgggagagcggggagggccttgaaagggttgcaagatactcgatggaggacgctaaggtgacctacgagctgggaagggagttcttcccgatggaggcccagctttcgaggcttataggccagagcctctgggacgtctcgcgctcgagcaccggaaatttggtggagtggttcctcctgcggaaggcctacaagaggaacgagctcgccccaaacaagcccgacgagagggagctcgcgagacggcgcgggggctacgctggcgggtacgttaaggaaccagagcggggattgtgggacaacattgtgtatttagacttccgctcggaatatccttcaatcatcataacccacaacgtctcgccggataccctcaaccgcgagggctgtaaagagtacgacgtcgcccctgaggttggacacaagttctgcaaggacttccccggcttcataccaagcctcctgggagatttgctcgaggagaggcagaagataaagcggaagatgaaggcaacggttgacccgctggagaagaaactcctcgattacaggatgtggcttataaaaatcctcgccaacagcttctacggctactacggctacgccaaggcccggtggtactgcaaggagtgcgccgagagcgttacggcctggggaagggagtatatagaaatggttatccgggaactcgaagaaaaattcggttttaaagttctctatgccgatacagacggtctccatgctaccattcccggagcagacgctgaaacagtcaagaaaaaagcaaaggagttcttaaaatacattaatccaaaactgcccggcctgctcgaacttgagtacgagggcttctacgtgaggggcttcttcgtcacgaagaagaagtacgctgtgatagacgaggagggcaagataaccacgaggggtcttgagattgtgaggcgcgactggagcgagatagcgaaggagacccaggccagggtcttagaggcgatactcaagcacggtgacgtcgaggaggccgttaggatagtcaaggaagtgacggaaaagctgagcaagtatgaggtcccgcccgagaagctggtaatccacgagcagataacgcgcgatttgagggattacaaagccaccggcccgcacgttgccgttgcgaagaggctcgcggcgcgtggagtgaaaatccggcccggcacggtgataagctacatcgtcctaaagggctctggaaggataggcgacagggcgattccagctgatgagttcgacccgacgaagcaccgctacgatgcggaatactacatcgagaaccaggttctcccggcggtggagaggattctaaaagccttcggctatcggaaggaggatttgcgctaccagaagacgaagcaggtcggctcgggcgcgtggctgaaggtgaaggggaagaagggtaccgaagcttacgtagaacaaaaactcatctcagaagaggatctgaatagcgccgtcgaccatcatcatcatcatcattga

SEQ ID NO: 172 - protein, 802 aa, Artificial Sequence
  Description of Artificial Sequence:Thermococcus species 9degreesN-7 mutant DNA polymerase, 9degreesN mutant
MILDTDYITENGKPVIRVFKKENGEFKIEYDRTFEPYFYALLKDDSAIEDVKKVTAKRHGTVVKVKRAEKVQKKFLGRPIEVWKLYFNHPQDVPAIRDRIRAHPAVVDIYEYDIPFAKRYLIDKGLIPMEGDEELTMLAFAIATLYHEGEEFGTGPILMISYADGSEARVITWKKIDLPYVDVVSTEKEMIKRFLRVVREKDPDVLITYNGDNFDFAYLKKRCEELGIKFTLGRDGSEPKIQRMGDRFAVEVKGRIHFDLYPVIRRTINLPTYTLEAVYEAVFGKPKEKVYAEEIAQAWESGEGLERVARYSMEDAKVTYELGREFFPMEAQLSRLIGQSLWDVSRSSTGNLVEWFLLRKAYKRNELAPNKPDERELARRRGGYAGGYVKEPERGLWDNIVYLDFRSEYPSIIITHNVSPDTLNREGCKEYDVAPEVGHKFCKDFPGFIPSLLGDLLEERQKIKRKMKATVDPLEKKLLDYRMWLIKILANSFYGYYGYAKARWYCKECAESVTAWGREYIEMVIRELEEKFGFKVLYADTDGLHATIPGADAETVKKKAKEFLKYINPKLPGLLELEYEGFYVRGFFVTKKKYAVIDEEGKITTRGLEIVRRDWSEIAKETQARVLEAILKHGDVEEAVRIVKEVTEKLSKYEVPPEKLVIHEQITRDLRDYKATGPHVAVAKRLAARGVKIRPGTVISYIVLKGSGRIGDRAIPADEFDPTKHRYDAEYYIENQVLPAVERILKAFGYRKEDLRYQKTKQVGSGAWLKVKGKKGTEAYVEQKLISEEDLNSAVDHHHHHH

SEQ ID NO: 173 - DNA, 2409 bp, Artificial Sequence
  Description of Artificial Sequence:Thermococcus species 9degreesN-7 mutant DNA polymerase, 9degreesN mutant
atgattctcgataccgactacatcaccgagaacgggaagcccgtgataagggtcttcaagaaggagaacggcgagtttaaaatcgagtacgacagaaccttcgagccctacttctacgcccttctgaaggacgattctgcgatagaggacgtcaagaaggtaaccgcaaagaggcacggaacggttgtcaaggtgaagcgcgccgagaaggtgcagaagaagttcctcggcaggccgatagaggtctggaagctctacttcaaccatcctcaggacgtcccggcgattcgagacaggatacgcgcccaccccgctgtcgttgacatctacgagtacgacatacccttcgccaagcgctacctcatcgacaagggcctgattccgatggagggcgacgaggagcttacgatgctcgccttcgcgatcgcaaccctctatcacgagggcgaggagttcggaaccgggccgattctcatgataagctacgccgacgggagcgaggcgagggtgataacctggaagaagattgaccttccgtacgttgacgtcgtctcgaccgagaaggagatgattaagcgcttcctccgcgtcgtcagggagaaggaccccgacgtgctcatcacctacaacggcgacaacttcgacttcgcctacctgaagaagcgctgtgaggaactcggaataaagttcacactcggcagggacgggagcgagccgaagatacagcgaatgggcgaccgctttgccgttgaggtgaagggcaggattcacttcgacctctaccccgtcataaggcgcacgataaacctcccgacctacacccttgaggccgtttacgaggccgtctttggaaagcccaaggagaaggtttacgcagaggagatagcgcaggcctgggagagcggggagggccttgaaagggttgcaagatactcgatggaggacgctaaggtgacctacgagctgggaagggagttcttcccgatggaggcccagctttcgaggcttataggccagagcctctgggacgtctcgcgctcgagcaccggaaatttggtggagtggttcctcctgcggaaggcctacaagaggaacgagctcgccccaaacaagcccgacgagagggagctcgcgagacggcgcgggggctacgctggcgggtacgttaaggaaccagagcggggattgtgggacaacattgtgtatttagacttccgctcgtggtatccttcaatcatcataacccacaacgtctcgccggataccctcaaccgcgagggctgtaaagagtacgacgtcgcccctgaggttggacacaagttctgcaaggacttccccggcttcataccaagcctcctgggagatttgctcgaggagaggcagaagataaagcggaagatgaaggcaacggttgacccgctggagaagaaactcctcgattacaggatgtggcttataaaaatcctcgccaacagcttctacggctactacggctacgccaaggcccggtggtactgcaaggagtgcgccgagagcgttacggcctggggaagggagtatatagaaatggttatccgggaactcgaagaaaaattcggttttaaagttctctatgccgatacagacggtctccatgctaccattcccggagcagacgctgaaacagtcaagaaaaaagcaaaggagttcttaaaatacattaatccaaaactgcccggcctgctcgaacttgagtacgagggcttctacgtgaggggcttcttcgtcacgaagaagaagtacgctgtgatagacgaggagggcaagataaccacgaggggtcttgagattgtgaggcgcgactggagcgagatagcgaaggagacccaggccagggtcttagaggcgatactcaagcacggtgacgtcgaggaggccgttaggatagtcaaggaagtgacggaaaagctgagcaagtatgaggtcccgcccgagaagctggtaatccacgagcagataacgcgcgatttgagggattacaaagccaccggcccgcacgttgccgttgcgaagaggctcgcggcgcgtggagtgaaaatccggcccggcacggtgataagctacatcgtcctaaagggctctggaaggataggcgacagggcgattccagctgatgagttcgacccgacgaagcaccgctacgatgcggaatactacatcgagaaccaggttctcccggcggtggagaggattctaaaagccttcggctatcggaaggaggatttgcgctaccagaagacgaagcaggtcggctcgggcgcgtggctgaaggtgaaggggaagaagggtaccgaagcttacgtagaacaaaaactcatctcagaagaggatctgaatagcgccgtcgaccatcatcatcatcatcattga

SEQ ID NO: 174 - protein, 802 aa, Artificial Sequence
  Description of Artificial Sequence:Thermococcus species 9degreesN-7 mutant DNA polymerase, 9degreesN mutant
MILDTDYITENGKPVIRVFKKENGEFKIEYDRTFEPYFYALLKDDSAIEDVKKVTAKRHGTVVKVKRAEKVQKKFLGRPIEVWKLYFNHPQDVPAIRDRIRAHPAVVDIYEYDIPFAKRYLIDKGLIPMEGDEELTMLAFAIATLYHEGEEFGTGPILMISYADGSEARVITWKKIDLPYVDVVSTEKEMIKRFLRVVREKDPDVLITYNGDNFDFAYLKKRCEELGIKFTLGRDGSEPKIQRMGDRFAVEVKGRIHFDLYPVIRRTINLPTYTLEAVYEAVFGKPKEKVYAEEIAQAWESGEGLERVARYSMEDAKVTYELGREFFPMEAQLSRLIGQSLWDVSRSSTGNLVEWFLLRKAYKRNELAPNKPDERELARRRGGYAGGYVKEPERGLWDNIVYLDFRSWYPSIIITHNVSPDTLNREGCKEYDVAPEVGHKFCKDFPGFIPSLLGDLLEERQKIKRKMKATVDPLEKKLLDYRMWLIKILANSFYGYYGYAKARWYCKECAESVTAWGREYIEMVIRELEEKFGFKVLYADTDGLHATIPGADAETVKKKAKEFLKYINPKLPGLLELEYEGFYVRGFFVTKKKYAVIDEEGKITTRGLEIVRRDWSEIAKETQARVLEAILKHGDVEEAVRIVKEVTEKLSKYEVPPEKLVIHEQITRDLRDYKATGPHVAVAKRLAARGVKIRPGTVISYIVLKGSGRIGDRAIPADEFDPTKHRYDAEYYIENQVLPAVERILKAFGYRKEDLRYQKTKQVGSGAWLKVKGKKGTEAYVEQKLISEEDLNSAVDHHHHHH

SEQ ID NO: 175 - DNA, 2409 bp, Artificial Sequence
  Description of Artificial Sequence:Thermococcus species 9degreesN-7 mutant DNA polymerase, 9degreesN mutant
atgattctcgataccgactacatcaccgagaacgggaagcccgtgataagggtcttcaagaaggagaacggcgagtttaaaatcgagtacgacagaaccttcgagccctacttctacgcccttctgaaggacgattctgcgatagaggacgtcaagaaggtaaccgcaaagaggcacggaacggttgtcaaggtgaagcgcgccgagaaggtgcagaagaagttcctcggcaggccgatagaggtctggaagctctacttcaaccatcctcaggacgtcccggcgattcgagacaggatacgcgcccaccccgctgtcgttgacatctacgagtacgacatacccttcgccaagcgctacctcatcgacaagggcctgattccgatggagggcgacgaggagcttacgatgctcgccttcgcgatcgcaaccctctatcacgagggcgaggagttcggaaccgggccgattctcatgataagctacgccgacgggagcgaggcgagggtgataacctggaagaagattgaccttccgtacgttgacgtcgtctcgaccgagaaggagatgattaagcgcttcctccgcgtcgtcagggagaaggaccccgacgtgctcatcacctacaacggcgacaacttcgacttcgcctacctgaagaagcgctgtgaggaactcggaataaagttcacactcggcagggacgggagcgagccgaagatacagcgaatgggcgaccgctttgccgttgaggtgaagggcaggattcacttcgacctctaccccgtcataaggcgcacgataaacctcccgacctacacccttgaggccgtttacgaggccgtctttggaaagcccaaggagaaggtttacgcagaggagatagcgcaggcctgggagagcggggagggccttgaaagggttgcaagatactcgatggaggacgctaaggtgacctacgagctgggaagggagttcttcccgatggaggcccagctttcgaggcttataggccagagcctctgggacgtctcgcgctcgagcaccggaaatttggtggagtggttcctcctgcggaaggcctacaagaggaacgagctcgccccaaacaagcccgacgagagggagctcgcgagacggcgcgggggctacgctggcgggtacgttaaggaaccagagcggggattgtgggacaacattgtgtatttagacttccgctcgcattatccttcaatcatcataacccacaacgtctcgccggataccctcaaccgcgagggctgtaaagagtacgacgtcgcccctgaggttggacacaagttctgcaaggacttccccggcttcataccaagcctcctgggagatttgctcgaggagaggcagaagataaagcggaagatgaaggcaacggttgacccgctggagaagaaactcctcgattacaggatgtggcttataaaaatcctcgccaacagcttctacggctactacggctacgccaaggcccggtggtactgcaaggagtgcgccgagagcgttacggcctggggaagggagtatatagaaatggttatccgggaactcgaagaaaaattcggttttaaagttctctatgccgatacagacggtctccatgctaccattcccggagcagacgctgaaacagtcaagaaaaaagcaaaggagttcttaaaatacattaatccaaaactgcccggcctgctcgaacttgagtacgagggcttctacgtgaggggcttcttcgtcacgaagaagaagtacgctgtgatagacgaggagggcaagataaccacgaggggtcttgagattgtgaggcgcgactggagcgagatagcgaaggagacccaggccagggtcttagaggcgatactcaagcacggtgacgtcgaggaggccgttaggatagtcaaggaagtgacggaaaagctgagcaagtatgaggtcccgcccgagaagctggtaatccacgagcagataacgcgcgatttgagggattacaaagccaccggcccgcacgttgccgttgcgaagaggctcgcggcgcgtggagtgaaaatccggcccggcacggtgataagctacatcgtcctaaagggctctggaaggataggcgacagggcgattccagctgatgagttcgacccgacgaagcaccgctacgatgcggaatactacatcgagaaccaggttctcccggcggtggagaggattctaaaagccttcggctatcggaaggaggatttgcgctaccagaagacgaagcaggtcggctcgggcgcgtggctgaaggtgaaggggaagaagggtaccgaagcttacgtagaacaaaaactcatctcagaagaggatctgaatagcgccgtcgaccatcatcatcatcatcattga

SEQ ID NO: 176 - protein, 802 aa, Artificial Sequence
  Description of Artificial Sequence:Thermococcus species 9degreesN-7 mutant DNA polymerase, 9degreesN mutant
MILDTDYITENGKPVIRVFKKENGEFKIEYDRTFEPYFYALLKDDSAIEDVKKVTAKRHGTVVKVKRAEKVQKKFLGRPIEVWKLYFNHPQDVPAIRDRIRAHPAVVDIYEYDIPFAKRYLIDKGLIPMEGDEELTMLAFAIATLYHEGEEFGTGPILMISYADGSEARVITWKKIDLPYVDVVSTEKEMIKRFLRVVREKDPDVLITYNGDNFDFAYLKKRCEELGIKFTLGRDGSEPKIQRMGDRFAVEVKGRIHFDLYPVIRRTINLPTYTLEAVYEAVFGKPKEKVYAEEIAQAWESGEGLERVARYSMEDAKVTYELGREFFPMEAQLSRLIGQSLWDVSRSSTGNLVEWFLLRKAYKRNELAPNKPDERELARRRGGYAGGYVKEPERGLWDNIVYLDFRSHYPSIIITHNVSPDTLNREGCKEYDVAPEVGHKFCKDFPGFIPSLLGDLLEERQKIKRKMKATVDPLEKKLLDYRMWLIKILANSFYGYYGYAKARWYCKECAESVTAWGREYIEMVIRELEEKFGFKVLYADTDGLHATIPGADAETVKKKAKEFLKYINPKLPGLLELEYEGFYVRGFFVTKKKYAVIDEEGKITTRGLEIVRRDWSEIAKETQARVLEAILKHGDVEEAVRIVKEVTEKLSKYEVPPEKLVIHEQITRDLRDYKATGPHVAVAKRLAARGVKIRPGTVISYIVLKGSGRIGDRAIPADEFDPTKHRYDAEYYIENQVLPAVERILKAFGYRKEDLRYQKTKQVGSGAWLKVKGKKGTEAYVEQKLISEEDLNSAVDHHHHHH

SEQ ID NO: 177 - DNA, 2409 bp, Artificial Sequence
  Description of Artificial Sequence:Thermococcus species 9degreesN-7 mutant DNA polymerase, 9degreesN mutant
atgattctcgataccgactacatcaccgagaacgggaagcccgtgataagggtcttcaagaaggagaacggcgagtttaaaatcgagtacgacagaaccttcgagccctacttctacgcccttctgaaggacgattctgcgatagaggacgtcaagaaggtaaccgcaaagaggcacggaacggttgtcaaggtgaagcgcgccgagaaggtgcagaagaagttcctcggcaggccgatagaggtctggaagctctacttcaaccatcctcaggacgtcccggcgattcgagacaggatacgcgcccaccccgctgtcgttgacatctacgagtacgacatacccttcgccaagcgctacctcatcgacaagggcctgattccgatggagggcgacgaggagcttacgatgctcgccttcgcgatcgcaaccctctatcacgagggcgaggagttcggaaccgggccgattctcatgataagctacgccgacgggagcgaggcgagggtgataacctggaagaagattgaccttccgtacgttgacgtcgtctcgaccgagaaggagatgattaagcgcttcctccgcgtcgtcagggagaaggaccccgacgtgctcatcacctacaacggcgacaacttcgacttcgcctacctgaagaagcgctgtgaggaactcggaataaagttcacactcggcagggacgggagcgagccgaagatacagcgaatgggcgaccgctttgccgttgaggtgaagggcaggattcacttcgacctctaccccgtcataaggcgcacgataaacctcccgacctacacccttgaggccgtttacgaggccgtctttggaaagcccaaggagaaggtttacgcagaggagatagcgcaggcctgggagagcggggagggccttgaaagggttgcaagatactcgatggaggacgctaaggtgacctacgagctgggaagggagttcttcccgatggaggcccagctttcgaggcttataggccagagcctctgggacgtctcgcgctcgagcaccggaaatttggtggagtggttcctcctgcggaaggcctacaagaggaacgagctcgccccaaacaagcccgacgagagggagctcgcgagacggcgcgggggctacgctggcgggtacgttaaggaaccagagcggggattgtgggacaacattgtgtatttagacttccgctcggagtatccttcaatcatcataacccacaacgtctcgccggataccctcaaccgcgagggctgtaaagagtacgacgtcgcccctgaggttggacacaagttctgcaaggacttccccggcttcataccaagcctcctgggagatttgctcgaggagaggcagaagataaagcggaagatgaaggcaacggttgacccgctggagaagaaactcctcgattacagggtgtggcttataaaaatcctcgccaacagcttctacggctactacggctacgccaaggcccggtggtactgcaaggagtgcgccgagagcgttacggcctggggaagggagtatatagaaatggttatccgggaactcgaagaaaaattcggttttaaagttctctatgccgatacagacggtctccatgctaccattcccggagcagacgctgaaacagtcaagaaaaaagcaaaggagttcttaaaatacattaatccaaaactgcccggcctgctcgaacttgagtacgagggcttctacgtgaggggcttcttcgtcacgaagaagaagtacgctgtgatagacgaggagggcaagataaccacgaggggtcttgagattgtgaggcgcgactggagcgagatagcgaaggagacccaggccagggtcttagaggcgatactcaagcacggtgacgtcgaggaggccgttaggatagtcaaggaagtgacggaaaagctgagcaagtatgaggtcccgcccgagaagctggtaatccacgagcagataacgcgcgatttgagggattacaaagccaccggcccgcacgttgccgttgcgaagaggctcgcggcgcgtggagtgaaaatccggcccggcacggtgataagctacatcgtcctaaagggctctggaaggataggcgacagggcgattccagctgatgagttcgacccgacgaagcaccgctacgatgcggaatactacatcgagaaccaggttctcccggcggtggagaggattctaaaagccttcggctatcggaaggaggatttgcgctaccagaagacgaagcaggtcggctcgggcgcgtggctgaaggtgaaggggaagaagggtaccgaagcttacgtagaacaaaaactcatctcagaagaggatctgaatagcgccgtcgaccatcatcatcatcatcattga

SEQ ID NO: 178 - protein, 802 aa, Artificial Sequence
  Description of Artificial Sequence:Thermococcus species 9degreesN-7 mutant DNA polymerase, 9degreesN mutant
MILDTDYITENGKPVIRVFKKENGEFKIEYDRTFEPYFYALLKDDSAIEDVKKVTAKRHGTVVKVKRAEKVQKKFLGRPIEVWKLYFNHPQDVPAIRDRIRAHPAVVDIYEYDIPFAKRYLIDKGLIPMEGDEELTMLAFAIATLYHEGEEFGTGPILMISYADGSEARVITWKKIDLPYVDVVSTEKEMIKRFLRVVREKDPDVLITYNGDNFDFAYLKKRCEELGIKFTLGRDGSEPKIQRMGDRFAVEVKGRIHFDLYPVIRRTINLPTYTLEAVYEAVFGKPKEKVYAEEIAQAWESGEGLERVARYSMEDAKVTYELGREFFPMEAQLSRLIGQSLWDVSRSSTGNLVEWFLLRKAYKRNELAPNKPDERELARRRGGYAGGYVKEPERGLWDNIVYLDFRSEYPSIIITHNVSPDTLNREGCKEYDVAPEVGHKFCKDFPGFIPSLLGDLLEERQKIKRKMKATVDPLEKKLLDYRVWLIKILANSFYGYYGYAKARWYCKECAESVTAWGREYIEMVIRELEEKFGFKVLYADTDGLHATIPGADAETVKKKAKEFLKYINPKLPGLLELEYEGFYVRGFFVTKKKYAVIDEEGKITTRGLEIVRRDWSEIAKETQARVLEAILKHGDVEEAVRIVKEVTEKLSKYEVPPEKLVIHEQITRDLRDYKATGPHVAVAKRLAARGVKIRPGTVISYIVLKGSGRIGDRAIPADEFDPTKHRYDAEYYIENQVLPAVERILKAFGYRKEDLRYQKTKQVGSGAWLKVKGKKGTEAYVEQKLISEEDLNSAVDHHHHHH

SEQ ID NO: 179 - DNA, 2409 bp, Artificial Sequence
  Description of Artificial Sequence:Thermococcus species 9degreesN-7 mutant DNA polymerase, 9degreesN mutant
atgattctcgataccgactacatcaccgagaacgggaagcccgtgataagggtcttcaagaaggagaacggcgagtttaaaatcgagtacgacagaaccttcgagccctacttctacgcccttctgaaggacgattctgcgatagaggacgtcaagaaggtaaccgcaaagaggcacggaacggttgtcaaggtgaagcgcgccgagaaggtgcagaagaagttcctcggcaggccgatagaggtctggaagctctacttcaaccatcctcaggacgtcccggcgattcgagacaggatacgcgcccaccccgctgtcgttgacatctacgagtacgacatacccttcgccaagcgctacctcatcgacaagggcctgattccgatggagggcgacgaggagcttacgatgctcgccttcgcgatcgcaaccctctatcacgagggcgaggagttcggaaccgggccgattctcatgataagctacgccgacgggagcgaggcgagggtgataacctggaagaagattgaccttccgtacgttgacgtcgtctcgaccgagaaggagatgattaagcgcttcctccgcgtcgtcagggagaaggaccccgacgtgctcatcacctacaacggcgacaacttcgacttcgcctacctgaagaagcgctgtgaggaactcggaataaagttcacactcggcagggacgggagcgagccgaagatacagcgaatgggcgaccgctttgccgttgaggtgaagggcaggattcacttcgacctctaccccgtcataaggcgcacgataaacctcccgacctacacccttgaggccgtttacgaggccgtctttggaaagcccaaggagaaggtttacgcagaggagatagcgcaggcctgggagagcggggagggccttgaaagggttgcaagatactcgatggaggacgctaaggtgacctacgagctgggaagggagttcttcccgatggaggcccagctttcgaggcagataggccagagcctctgggacgtctcgcgctcgagcaccggaaatttggtggagtggttcctcctgcggaaggcctacaagaggaacgagctcgccccaaacaagcccgacgagagggagctcgcgagacggcgcgggggctacgctggcgggtacgttaaggaaccagagcggggattgtgggacaacattgtgtatttagacttccgctcgctgtatccttcaatcatcataacccacaacgtctcgccggataccctcaaccgcgagggctgtaaagagtacgacgtcgcccctgaggttggacacaagttctgcaaggacttccccggcttcataccaagcctcctgggagatttgctcgaggagaggcagaagataaagcggaagatgaaggcaacggttgacccgctggagaagaaactcctcgattacaggatgtggcttataaaaatcctcgccaacagcttctacggctactacggctacgccaaggcccggtggtactgcaaggagtgcgccgagagcgttacggcctggggaagggagtatatagaaatggttatccgggaactcgaagaaaaattcggttttaaagttctctatgccgatacagacggtctccatgctaccattcccggagcagacgctgaaacagtcaagaaaaaagcaaaggagttcttaaaatacattaatccaaaactgcccggcctgctcgaacttgagtacgagggcttctacgtgaggggcttcttcgtcacgaagaagaagtacgctgtgatagacgaggagggcaagataaccacgaggggtcttgagattgtgaggcgcgactggagcgagatagcgaaggagacccaggccagggtcttagaggcgatactcaagcacggtgacgtcgaggaggccgttaggatagtcaaggaagtgacggaaaagctgagcaagtatgaggtcccgcccgagaagctggtaatccacgagcagataacgcgcgatttgagggattacaaagccaccggcccgcacgttgccgttgcgaagaggctcgcggcgcgtggagtgaaaatccggcccggcacggtgataagctacatcgtcctaaagggctctggaaggataggcgacagggcgattccagctgatgagttcgacccgacgaagcaccgctacgatgcggaatactacatcgagaaccaggttctcccggcggtggagaggattctaaaagccttcggctatcggaaggaggatttgcgctaccagaagacgaagcaggtcggctcgggcgcgtggctgaaggtgaaggggaagaagggtaccgaagcttacgtagaacaaaaactcatctcagaagaggatctgaatagcgccgtcgaccatcatcatcatcatcattga

SEQ ID NO: 180 - protein, 802 aa, Artificial Sequence
  Description of Artificial Sequence:Thermococcus species 9degreesN-7 mutant DNA polymerase, 9degreesN mutant
MILDTDYITENGKPVIRVFKKENGEFKIEYDRTFEPYFYALLKDDSAIEDVKKVTAKRHGTVVKVKRAEKVQKKFLGRPIEVWKLYFNHPQDVPAIRDRIRAHPAVVDIYEYDIPFAKRYLIDKGLIPMEGDEELTMLAFAIATLYHEGEEFGTGPILMISYADGSEARVITWKKIDLPYVDVVSTEKEMIKRFLRVVREKDPDVLITYNGDNFDFAYLKKRCEELGIKFTLGRDGSEPKIQRMGDRFAVEVKGRIHFDLYPVIRRTINLPTYTLEAVYEAVFGKPKEKVYAEEIAQAWESGEGLERVARYSMEDAKVTYELGREFFPMEAQLSRQIGQSLWDVSRSSTGNLVEWFLLRKAYKRNELAPNKPDERELARRRGGYAGGYVKEPERGLWDNIVYLDFRSLYPSIIITHNVSPDTLNREGCKEYDVAPEVGHKFCKDFPGFIPSLLGDLLEERQKIKRKMKATVDPLEKKLLDYRMWLIKILANSFYGYYGYAKARWYCKECAESVTAWGREYIEMVIRELEEKFGFKVLYADTDGLHATIPGADAETVKKKAKEFLKYINPKLPGLLELEYEGFYVRGFFVTKKKYAVIDEEGKITTRGLEIVRRDWSEIAKETQARVLEAILKHGDVEEAVRIVKEVTEKLSKYEVPPEKLVIHEQITRDLRDYKATGPHVAVAKRLAARGVKIRPGTVISYIVLKGSGRIGDRAIPADEFDPTKHRYDAEYYIENQVLPAVERILKAFGYRKEDLRYQKTKQVGSGAWLKVKGKKGTEAYVEQKLISEEDLNSAVDHHHHHH

SEQ ID NO: 181 - DNA, 2409 bp, Artificial Sequence
  Description of Artificial Sequence:Thermococcus species 9degreesN-7 mutant DNA polymerase, 9degreesN mutant
atgattctcgataccgactacatcaccgagaacgggaagcccgtgataagggtcttcaagaaggagaacggcgagtttaaaatcgagtacgacagaaccttcgagccctacttctacgcccttctgaaggacgattctgcgatagaggacgtcaagaaggtaaccgcaaagaggcacggaacggttgtcaaggtgaagcgcgccgagaaggtgcagaagaagttcctcggcaggccgatagaggtctggaagctctacttcaaccatcctcaggacgtcccggcgattcgagacaggatacgcgcccaccccgctgtcgttgacatctacgagtacgacatacccttcgccaagcgctacctcatcgacaagggcctgattccgatggagggcgacgaggagcttacgatgctcgccttcgcgatcgcaaccctctatcacgagggcgaggagttcggaaccgggccgattctcatgataagctacgccgacgggagcgaggcgagggtgataacctggaagaagattgaccttccgtacgttgacgtcgtctcgaccgagaaggagatgattaagcgcttcctccgcgtcgtcagggagaaggaccccgacgtgctcatcacctacaacggcgacaacttcgacttcgcctacctgaagaagcgctgtgaggaactcggaataaagttcacactcggcagggacgggagcgagccgaagatacagcgaatgggcgaccgctttgccgttgaggtgaagggcaggattcacttcgacctctaccccgtcataaggcgcacgataaacctcccgacctacacccttgaggccgtttacgaggccgtctttggaaagcccaaggagaaggtttacgcagaggagatagcgcaggcctgggagagcggggagggccttgaaagggttgcaagatactcgatggaggacgctaaggtgacctacgagctgggaagggagttcttcccgatggaggcccagctttcgaggcttataggccagagcctctgggacgtctcgcgctcgagcaccggaaatttggtggagtggttcctcctgcggaaggcctacaagaggaacgagctcgccccaaacaagcccgacgagagggagctcgcgagacggcgcgggggctacgctggcgggtacgttaaggaaccagagcggggattgtgggacaacattgtgtatttagacttccgctcgctgtatccttcaatcatcataacccacaacgtctcgccggataccctcaaccgcgagggctgtaaagagtacgacgtcgcccctgaggttggacacaagttctgcaaggacttccccggcttcataccaagcctcctgggagatttgctcgaggagaggcagaagataaagcggaagatgaaggcaacggttgacccgctggagaagaaactcctcgattacaggatgtggcttataaaaatcctcgccaacagcttctacggcagttacggctacgccaaggcccggtggtactgcaaggagtgcgccgagagcgttacggcctggggaagggagtatatagaaatggttatccgggaactcgaagaaaaattcggttttaaagttctctatgccgatacagacggtctccatgctaccattcccggagcagacgctgaaacagtcaagaaaaaagcaaaggagttcttaaaatacattaatccaaaactgcccggcctgctcgaacttgagtacgagggcttctacgtgaggggcttcttcgtcacgaagaagaagtacgctgtgatagacgaggagggcaagataaccacgaggggtcttgagattgtgaggcgcgactggagcgagatagcgaaggagacccaggccagggtcttagaggcgatactcaagcacggtgacgtcgaggaggccgttaggatagtcaaggaagtgacggaaaagctgagcaagtatgaggtcccgcccgagaagctggtaatccacgagcagataacgcgcgatttgagggattacaaagccaccggcccgcacgttgccgttgcgaagaggctcgcggcgcgtggagtgaaaatccggcccggcacggtgataagctacatcgtcctaaagggctctggaaggataggcgacagggcgattccagctgatgagttcgacccgacgaagcaccgctacgatgcggaatactacatcgagaaccaggttctcccggcggtggagaggattctaaaagccttcggctatcggaaggaggatttgcgctaccagaagacgaagcaggtcggctcgggcgcgtggctgaaggtgaaggggaagaagggtaccgaagcttacgtagaacaaaaactcatctcagaagaggatctgaatagcgccgtcgaccatcatcatcatcatcattga

SEQ ID NO: 182 - protein, 802 aa, Artificial Sequence
  Description of Artificial Sequence:Thermococcus species 9degreesN-7 mutant DNA polymerase, 9degreesN mutant
MILDTDYITENGKPVIRVFKKENGEFKIEYDRTFEPYFYALLKDDSAIEDVKKVTAKRHGTVVKVKRAEKVQKKFLGRPIEVWKLYFNHPQDVPAIRDRIRAHPAVVDIYEYDIPFAKRYLIDKGLIPMEGDEELTMLAFAIATLYHEGEEFGTGPILMISYADGSEARVITWKKIDLPYVDVVSTEKEMIKRFLRVVREKDPDVLITYNGDNFDFAYLKKRCEELGIKFTLGRDGSEPKIQRMGDRFAVEVKGRIHFDLYPVIRRTINLPTYTLEAVYEAVFGKPKEKVYAEEIAQAWESGEGLERVARYSMEDAKVTYELGREFFPMEAQLSRLIGQSLWDVSRSSTGNLVEWFLLRKAYKRNELAPNKPDERELARRRGGYAGGYVKEPERGLWDNIVYLDFRSLYPSIIITHNVSPDTLNREGCKEYDVAPEVGHKFCKDFPGFIPSLLGDLLEERQKIKRKMKATVDPLEKKLLDYRMWLIKILANSFYGSYGYAKARWYCKECAESVTAWGREYIEMVIRELEEKFGFKVLYADTDGLHATIPGADAETVKKKAKEFLKYINPKLPGLLELEYEGFYVRGFFVTKKKYAVIDEEGKITTRGLEIVRRDWSEIAKETQARVLEAILKHGDVEEAVRIVKEVTEKLSKYEVPPEKLVIHEQITRDLRDYKATGPHVAVAKRLAARGVKIRPGTVISYIVLKGSGRIGDRAIPADEFDPTKHRYDAEYYIENQVLPAVERILKAFGYRKEDLRYQKTKQVGSGAWLKVKGKKGTEAYVEQKLISEEDLNSAVDHHHHHH

SEQ ID NO: 183 - DNA, 2409 bp, Artificial Sequence
  Description of Artificial Sequence:Thermococcus species 9degreesN-7 mutant DNA polymerase, 9degreesN mutant
atgattctcgataccgactacatcaccgagaacgggaagcccgtgataagggtcttcaagaaggagaacggcgagtttaaaatcgagtacgacagaaccttcgagccctacttctacgcccttctgaaggacgattctgcgatagaggacgtcaagaaggtaaccgcaaagaggcacggaacggttgtcaaggtgaagcgcgccgagaaggtgcagaagaagttcctcggcaggccgatagaggtctggaagctctacttcaaccatcctcaggacgtcccggcgattcgagacaggatacgcgcccaccccgctgtcgttgacatctacgagtacgacatacccttcgccaagcgctacctcatcgacaagggcctgattccgatggagggcgacgaggagcttacgatgctcgccttcgcgatcgcaaccctctatcacgagggcgaggagttcggaaccgggccgattctcatgataagctacgccgacgggagcgaggcgagggtgataacctggaagaagattgaccttccgtacgttgacgtcgtctcgaccgagaaggagatgattaagcgcttcctccgcgtcgtcagggagaaggaccccgacgtgctcatcacctacaacggcgacaacttcgacttcgcctacctgaagaagcgctgtgaggaactcggaataaagttcacactcggcagggacgggagcgagccgaagatacagcgaatgggcgaccgctttgccgttgaggtgaagggcaggattcacttcgacctctaccccgtcataaggcgcacgataaacctcccgacctacacccttgaggccgtttacgaggccgtctttggaaagcccaaggagaaggtttacgcagaggagatagcgcaggcctgggagagcggggagggccttgaaagggttgcaagatactcgatggaggacgctaaggtgacctacgagctgggaagggagttcttcccgatggaggcccagctttcgaggcttataggccagagcctctgggacgtctcgcgctcgagcaccggaaatttggtggagtggttcctcctgcggaaggcctacaagaggaacgagctcgccccaaacaagcccgacgagagggagctcgcgagacggcgcgggggctacgctggcgggtacgttaaggaaccagagcggggattgtgggacaacattgtgtatttagacttccgctcggaatatccttcaatcatcataacccacaacgtctcgccggataccctcaaccgcgagggctgtaaagagtacgacgtcgcccctgaggttggacacaagttctgcaaggacttccccggcttcataccaagcctcctgggagatttgctcgaggagaggcagaagataaagcggaagatgaaggcaacggttgacccgctggagaagaaactcctcgtgtacaggcagtggcttataaaaatcctcgccaacagcttctacggctactacggctacgccaaggcccggtggtactgcaaggagtgcgccgagagcgttacggcctggggaagggagtatatagaaatggttatccgggaactcgaagaaaaattcggttttaaagttctctatgccgatacagacggtctccatgctaccattcccggagcagacgctgaaacagtcaagaaaaaagcaaaggagttcttaaaatacattaatccaaaactgcccggcctgctcgaacttgagtacgagggcttctacgtgaggggcttcttcgtcacgaagaagaagtacgctgtgatagacgaggagggcaagataaccacgaggggtcttgagattgtgaggcgcgactggagcgagatagcgaaggagacccaggccagggtcttagaggcgatactcaagcacggtgacgtcgaggaggccgttaggatagtcaaggaagtgacggaaaagctgagcaagtatgaggtcccgcccgagaagctggtaatccacgagcagataacgcgcgatttgagggattacaaagccaccggcccgcacgttgccgttgcgaagaggctcgcggcgcgtggagtgaaaatccggcccggcacggtgataagctacatcgtcctaaagggctctggaaggataggcgacagggcgattccagctgatgagttcgacccgacgaagcaccgctacgatgcggaatactacatcgagaaccaggttctcccggcggtggagaggattctaaaagccttcggctatcggaaggaggatttgcgctaccagaagacgaagcaggtcggctcgggcgcgtggctgaaggtgaaggggaagaagggtaccgaagcttacgtagaacaaaaactcatctcagaagaggatctgaatagcgccgtcgaccatcatcatcatcatcattga

SEQ ID NO: 184 - protein, 802 aa, Artificial Sequence
  Description of Artificial Sequence:Thermococcus species 9degreesN-7 mutant DNA polymerase, 9degreesN mutant
MILDTDYITENGKPVIRVFKKENGEFKIEYDRTFEPYFYALLKDDSAIEDVKKVTAKRHGTVVKVKRAEKVQKKFLGRPIEVWKLYFNHPQDVPAIRDRIRAHPAVVDIYEYDIPFAKRYLIDKGLIPMEGDEELTMLAFAIATLYHEGEEFGTGPILMISYADGSEARVITWKKIDLPYVDVVSTEKEMIKRFLRVVREKDPDVLITYNGDNFDFAYLKKRCEELGIKFTLGRDGSEPKIQRMGDRFAVEVKGRIHFDLYPVIRRTINLPTYTLEAVYEAVFGKPKEKVYAEEIAQAWESGEGLERVARYSMEDAKVTYELGREFFPMEAQLSRLIGQSLWDVSRSSTGNLVEWFLLRKAYKRNELAPNKPDERELARRRGGYAGGYVKEPERGLWDNIVYLDFRSEYPSIIITHNVSPDTLNREGCKEYDVAPEVGHKFCKDFPGFIPSLLGDLLEERQKIKRKMKATVDPLEKKLLVYRQWLIKILANSFYGYYGYAKARWYCKECAESVTAWGREYIEMVIRELEEKFGFKVLYADTDGLHATIPGADAETVKKKAKEFLKYINPKLPGLLELEYEGFYVRGFFVTKKKYAVIDEEGKITTRGLEIVRRDWSEIAKETQARVLEAILKHGDVEEAVRIVKEVTEKLSKYEVPPEKLVIHEQITRDLRDYKATGPHVAVAKRLAARGVKIRPGTVISYIVLKGSGRIGDRAIPADEFDPTKHRYDAEYYIENQVLPAVERILKAFGYRKEDLRYQKTKQVGSGAWLKVKGKKGTEAYVEQKLISEEDLNSAVDHHHHHH

SEQ ID NO: 185 - DNA, 2409 bp, Artificial Sequence
  Description of Artificial Sequence:Thermococcus species 9degreesN-7 mutant DNA polymerase, 9degreesN mutant
atgattctcgataccgactacatcaccgagaacgggaagcccgtgataagggtcttcaagaaggagaacggcgagtttaaaatcgagtacgacagaaccttcgagccctacttctacgcccttctgaaggacgattctgcgatagaggacgtcaagaaggtaaccgcaaagaggcacggaacggttgtcaaggtgaagcgcgccgagaaggtgcagaagaagttcctcggcaggccgatagaggtctggaagctctacttcaaccatcctcaggacgtcccggcgattcgagacaggatacgcgcccaccccgctgtcgttgacatctacgagtacgacatacccttcgccaagcgctacctcatcgacaagggcctgattccgatggagggcgacgaggagcttacgatgctcgccttcgcgatcgcaaccctctatcacgagggcgaggagttcggaaccgggccgattctcatgataagctacgccgacgggagcgaggcgagggtgataacctggaagaagattgaccttccgtacgttgacgtcgtctcgaccgagaaggagatgattaagcgcttcctccgcgtcgtcagggagaaggaccccgacgtgctcatcacctacaacggcgacaacttcgacttcgcctacctgaagaagcgctgtgaggaactcggaataaagttcacactcggcagggacgggagcgagccgaagatacagcgaatgggcgaccgctttgccgttgaggtgaagggcaggattcacttcgacctctaccccgtcataaggcgcacgataaacctcccgacctacacccttgaggccgtttacgaggccgtctttggaaagcccaaggagaaggtttacgcagaggagatagcgcaggcctgggagagcggggagggccttgaaagggttgcaagatactcgatggaggacgctaaggtgacctacgagctgggaagggagttcttcccgatggaggcccagctttcgaggcttataggccagagcctctgggacgtctcgcgctcgagcaccggaaatttggtggaggcattcctcctgcggaaggcctacaagaggaacgagctcgccccaaacaagcccgacgagagggagctcgcgagacggcgcgggggctacgctggcgggtacgttaaggaaccagagcggggattgtgggacaacattgtgtatttagacttccgctcgctgtatccttcaatcatcataacccacaacgtctcgccggataccctcaaccgcgagggctgtaaagagtacgacgtcgcccctgaggttggacacaagttctgcaaggacttccccggcttcataccaagcctcctgggagatttgctcgaggagaggcagaagatagagcggaagatgaaggcaacggttgacccgctggagaagaaactcctcgtgtacaggcagtggcttataaaaatcctcgccaacagcttctacggctactacggctacgccaaggcccggtggtactgcaaggagtgcgccgagagcgttacggcctggggaagggagtatatagaaatggttatccgggaactcgaagaaaaattcggttttaaagttctctatgccgatacagacggtctccatgctaccattcccggagcagacgctgaaacagtcaagaaaaaagcaaaggagttcttaaaatacattaatccaaaactgcccggcctgctcgaacttgagtacgagggcttctacgtgaggggcttcttcgtcacgaagaagaagtacgctgtgatagacgaggagggcaagataaccacgaggggtcttgagattgtgaggcgcgactggagcgagatagcgaaggagacccaggccagggtcttagaggcgatactcaagcacggtgacgtcgaggaggccgttaggatagtcaaggaagtgacggaaaagctgagcaagtatgaggtcccgcccgagaagctggtaatccacgagcagataacgcgcgatttgagggattacaaagccaccggcccgcacgttgccgttgcgaagaggctcgcggcgcgtggagtgaaaatccggcccggcacggtgataagctacatcgtcctaaagggctctggaaggataggcgacagggcgattccagctgatgagttcgacccgacgaagcaccgctacgatgcggaatactacatcgagaaccaggttctcccggcggtggagaggattctaaaagccttcggctatcggaaggaggatttgcgctaccagaagacgaagcaggtcggctcgggcgcgtggctgaaggtgaaggggaagaagggtaccgaagcttacgtagaacaaaaactcatctcagaagaggatctgaatagcgccgtcgaccatcatcatcatcatcattga

SEQ ID NO: 186 - protein, 802 aa, Artificial Sequence
  Description of Artificial Sequence:Thermococcus species 9degreesN-7 mutant DNA polymerase, 9degreesN mutant
MILDTDYITENGKPVIRVFKKENGEFKIEYDRTFEPYFYALLKDDSAIEDVKKVTAKRHGTVVKVKRAEKVQKKFLGRPIEVWKLYFNHPQDVPAIRDRIRAHPAVVDIYEYDIPFAKRYLIDKGLIPMEGDEELTMLAFAIATLYHEGEEFGTGPILMISYADGSEARVITWKKIDLPYVDVVSTEKEMIKRFLRVVREKDPDVLITYNGDNFDFAYLKKRCEELGIKFTLGRDGSEPKIQRMGDRFAVEVKGRIHFDLYPVIRRTINLPTYTLEAVYEAVFGKPKEKVYAEEIAQAWESGEGLERVARYSMEDAKVTYELGREFFPMEAQLSRLIGQSLWDVSRSSTGNLVEAFLLRKAYKRNELAPNKPDERELARRRGGYAGGYVKEPERGLWDNIVYLDFRSLYPSIIITHNVSPDTLNREGCKEYDVAPEVGHKFCKDFPGFIPSLLGDLLEERQKIERKMKATVDPLEKKLLVYRQWLIKILANSFYGYYGYAKARWYCKECAESVTAWGREYIEMVIRELEEKFGFKVLYADTDGLHATIPGADAETVKKKAKEFLKYINPKLPGLLELEYEGFYVRGFFVTKKKYAVIDEEGKITTRGLEIVRRDWSEIAKETQARVLEAILKHGDVEEAVRIVKEVTEKLSKYEVPPEKLVIHEQITRDLRDYKATGPHVAVAKRLAARGVKIRPGTVISYIVLKGSGRIGDRAIPADEFDPTKHRYDAEYYIENQVLPAVERILKAFGYRKEDLRYQKTKQVGSGAWLKVKGKKGTEAYVEQKLISEEDLNSAVDHHHHHH

SEQ ID NO: 187 - DNA, 2409 bp, Artificial Sequence
  Description of Artificial Sequence:Thermococcus species 9degreesN-7 mutant DNA polymerase, 9degreesN mutant
atgattctcgataccgactacatcaccgagaacgggaagcccgtgataagggtcttcaagaaggagaacggcgagtttaaaatcgagtacgacagaaccttcgagccctacttctacgcccttctgaaggacgattctgcgatagaggacgtcaagaaggtaaccgcaaagaggcacggaacggttgtcaaggtgaagcgcgccgagaaggtgcagaagaagttcctcggcaggccgatagaggtctggaagctctacttcaaccatcctcaggacgtcccggcgattcgagacaggatacgcgcccaccccgctgtcgttgacatctacgagtacgacatacccttcgccaagcgctacctcatcgacaagggcctgattccgatggagggcgacgaggagcttacgatgctcgccttcgcgatcgcaaccctctatcacgagggcgaggagttcggaaccgggccgattctcatgataagctacgccgacgggagcgaggcgagggtgataacctggaagaagattgaccttccgtacgttgacgtcgtctcgaccgagaaggagatgattaagcgcttcctccgcgtcgtcagggagaaggaccccgacgtgctcatcacctacaacggcgacaacttcgacttcgcctacctgaagaagcgctgtgaggaactcggaataaagttcacactcggcagggacgggagcgagccgaagatacagcgaatgggcgaccgctttgccgttgaggtgaagggcaggattcacttcgacctctaccccgtcataaggcgcacgataaacctcccgacctacacccttgaggccgtttacgaggccgtctttggaaagcccaaggagaaggtttacgcagaggagatagcgcaggcctgggagagcggggagggccttgaaagggttgcaagatactcgatggaggacgctaaggtgacctacgagctgggaagggagttcttcccgatggaggcccagctttcgaggcttataggccagagcctctgggacgtctcgcgctcgagcaccggaaatttggtggagtgggctctcctgcggaaggcctacaagaggaacgagctcgccccaaacaagcccgacgagagggagctcgcgagacggcgcgggggctacgctggcgggtacgttaaggaaccagagcggggattgtgggacaacattgtgtatttagacttccgctcgctgtatccttcaatcatcataacccacaacgtctcgccggataccctcaaccgcgagggctgtaaagagtacgacgtcgcccctgaggttggacacaagttctgcaaggacttccccggcttcataccaagcctcctgggagatttgctcgaggagaggcagaagataaagcggaagatgaaggcaacggttgacccgctggagaagaaactcctcgattacaggatgtggcttataaaaatcctcgccaacagcttctacggctactacggctacgccaaggcccggtggtactgcaaggagtgcgccgagagcgttacggcctggggaagggagtatatagaaatggttatccgggaactcgaagaaaaattcggttttaaagttctctatgccgatacagacggtctccatgctaccattcccggagcagacgctgaaacagtcaagaaaaaagcaaaggagttcttaaaatacattaatccaaaactgcccggcctgctcgaacttgagtacgagggcttctacgtgaggggcttcttcgtcacgaagaagaagtacgctgtgatagacgaggagggcaagataaccacgaggggtcttgagattgtgaggcgcgactggagcgagatagcgaaggagacccaggccagggtcttagaggcgatactcaagcacggtgacgtcgaggaggccgttaggatagtcaaggaagtgacggaaaagctgagcaagtatgaggtcccgcccgagaagctggtaatccacgagcagataacgcgcgatttgagggattacaaagccaccggcccgcacgttgccgttgcgaagaggctcgcggcgcgtggagtgaaaatccggcccggcacggtgataagctacatcgtcctaaagggctctggaaggataggcgacagggcgattccagctgatgagttcgacccgacgaagcaccgctacgatgcggaatactacatcgagaaccaggttctcccggcggtggagaggattctaaaagccttcggctatcggaaggaggatttgcgctaccagaagacgaagcaggtcggctcgggcgcgtggctgaaggtgaaggggaagaagggtaccgaagcttacgtagaacaaaaactcatctcagaagaggatctgaatagcgccgtcgaccatcatcatcatcatcattga

SEQ ID NO: 188 - protein, 802 aa, Artificial Sequence
  Description of Artificial Sequence:Thermococcus species 9degreesN-7 mutant DNA polymerase, 9degreesN mutant
MILDTDYITENGKPVIRVFKKENGEFKIEYDRTFEPYFYALLKDDSAIEDVKKVTAKRHGTVVKVKRAEKVQKKFLGRPIEVWKLYFNHPQDVPAIRDRIRAHPAVVDIYEYDIPFAKRYLIDKGLIPMEGDEELTMLAFAIATLYHEGEEFGTGPILMISYADGSEARVITWKKIDLPYVDVVSTEKEMIKRFLRVVREKDPDVLITYNGDNFDFAYLKKRCEELGIKFTLGRDGSEPKIQRMGDRFAVEVKGRIHFDLYPVIRRTINLPTYTLEAVYEAVFGKPKEKVYAEEIAQAWESGEGLERVARYSMEDAKVTYELGREFFPMEAQLSRLIGQSLWDVSRSSTGNLVEWALLRKAYKRNELAPNKPDERELARRRGGYAGGYVKEPERGLWDNIVYLDFRSLYPSIIITHNVSPDTLNREGCKEYDVAPEVGHKFCKDFPGFIPSLLGDLLEERQKIKRKMKATVDPLEKKLLDYRMWLIKILANSFYGYYGYAKARWYCKECAESVTAWGREYIEMVIRELEEKFGFKVLYADTDGLHATIPGADAETVKKKAKEFLKYINPKLPGLLELEYEGFYVRGFFVTKKKYAVIDEEGKITTRGLEIVRRDWSEIAKETQARVLEAILKHGDVEEAVRIVKEVTEKLSKYEVPPEKLVIHEQITRDLRDYKATGPHVAVAKRLAARGVKIRPGTVISYIVLKGSGRIGDRAIPADEFDPTKHRYDAEYYIENQVLPAVERILKAFGYRKEDLRYQKTKQVGSGAWLKVKGKKGTEAYVEQKLISEEDLNSAVDHHHHHH

SEQ ID NO: 189 - DNA, 2409 bp, Artificial Sequence
  Description of Artificial Sequence:Thermococcus species 9degreesN-7 mutant DNA polymerase, 9degreesN mutant
atgattctcgataccgactacatcaccgagaacgggaagcccgtgataagggtcttcaagaaggagaacggcgagtttaaaatcgagtacgacagaaccttcgagccctacttctacgcccttctgaaggacgattctgcgatagaggacgtcaagaaggtaaccgcaaagaggcacggaacggttgtcaaggtgaagcgcgccgagaaggtgcagaagaagttcctcggcaggccgatagaggtctggaagctctacttcaaccatcctcaggacgtcccggcgattcgagacaggatacgcgcccaccccgctgtcgttgacatctacgagtacgacatacccttcgccaagcgctacctcatcgacaagggcctgattccgatggagggcgacgaggagcttacgatgctcgccttcgcgatcgcaaccctctatcacgagggcgaggagttcggaaccgggccgattctcatgataagctacgccgacgggagcgaggcgagggtgataacctggaagaagattgaccttccgtacgttgacgtcgtctcgaccgagaaggagatgattaagcgcttcctccgcgtcgtcagggagaaggaccccgacgtgctcatcacctacaacggcgacaacttcgacttcgcctacctgaagaagcgctgtgaggaactcggaataaagttcacactcggcagggacgggagcgagccgaagatacagcgaatgggcgaccgctttgccgttgaggtgaagggcaggattcacttcgacctctaccccgtcataaggcgcacgataaacctcccgacctacacccttgaggccgtttacgaggccgtctttggaaagcccaaggagaaggtttacgcagaggagatagcgcaggcctgggagagcggggagggccttgaaagggttgcaagatactcgatggaggacgctaaggtgacctacgagctgggaagggagttcttcccgatggaggcccagctttcgaggcttataggccagagcctctgggacgtctcgcgctcgagcaccggaaatttggtggagtggcagctcctgcggaaggcctacaagaggaacgagctcgccccaaacaagcccgacgagagggagctcgcgagacggcgcgggggctacgctggcgggtacgttaaggaaccagagcggggattgtgggacaacattgtgtatttagacttccgctcgctgtatccttcaatcatcataacccacaacgtctcgccggataccctcaaccgcgagggctgtaaagagtacgacgtcgcccctgaggttggacacaagttctgcaaggacttccccggcttcataccaagcctcctgggagatttgctcgaggagaggcagaagataaagcggaagatgaaggcaacggttgacccgctggagaagaaactcctcgattacaggatgtggcttataaaaatcctcgccaacagcttctacggctactacggctacgccaaggcccggtggtactgcaaggagtgcgccgagagcgttacggcctggggaagggagtatatagaaatggttatccgggaactcgaagaaaaattcggttttaaagttctctatgccgatacagacggtctccatgctaccattcccggagcagacgctgaaacagtcaagaaaaaagcaaaggagttcttaaaatacattaatccaaaactgcccggcctgctcgaacttgagtacgagggcttctacgtgaggggcttcttcgtcacgaagaagaagtacgctgtgatagacgaggagggcaagataaccacgaggggtcttgagattgtgaggcgcgactggagcgagatagcgaaggagacccaggccagggtcttagaggcgatactcaagcacggtgacgtcgaggaggccgttaggatagtcaaggaagtgacggaaaagctgagcaagtatgaggtcccgcccgagaagctggtaatccacgagcagataacgcgcgatttgagggattacaaagccaccggcccgcacgttgccgttgcgaagaggctcgcggcgcgtggagtgaaaatccggcccggcacggtgataagctacatcgtcctaaagggctctggaaggataggcgacagggcgattccagctgatgagttcgacccgacgaagcaccgctacgatgcggaatactacatcgagaaccaggttctcccggcggtggagaggattctaaaagccttcggctatcggaaggaggatttgcgctaccagaagacgaagcaggtcggctcgggcgcgtggctgaaggtgaaggggaagaagggtaccgaagcttacgtagaacaaaaactcatctcagaagaggatctgaatagcgccgtcgaccatcatcatcatcatcattga

SEQ ID NO: 190 - protein, 802 aa, Artificial Sequence
  Description of Artificial Sequence:Thermococcus species 9degreesN-7 mutant DNA polymerase, 9degreesN mutant
MILDTDYITENGKPVIRVFKKENGEFKIEYDRTFEPYFYALLKDDSAIEDVKKVTAKRHGTVVKVKRAEKVQKKFLGRPIEVWKLYFNHPQDVPAIRDRIRAHPAVVDIYEYDIPFAKRYLIDKGLIPMEGDEELTMLAFAIATLYHEGEEFGTGPILMISYADGSEARVITWKKIDLPYVDVVSTEKEMIKRFLRVVREKDPDVLITYNGDNFDFAYLKKRCEELGIKFTLGRDGSEPKIQRMGDRFAVEVKGRIHFDLYPVIRRTINLPTYTLEAVYEAVFGKPKEKVYAEEIAQAWESGEGLERVARYSMEDAKVTYELGREFFPMEAQLSRLIGQSLWDVSRSSTGNLVEWQLLRKAYKRNELAPNKPDERELARRRGGYAGGYVKEPERGLWDNIVYLDFRSLYPSIIITHNVSPDTLNREGCKEYDVAPEVGHKFCKDFPGFIPSLLGDLLEERQKIKRKMKATVDPLEKKLLDYRMWLIKILANSFYGYYGYAKARWYCKECAESVTAWGREYIEMVIRELEEKFGFKVLYADTDGLHATIPGADAETVKKKAKEFLKYINPKLPGLLELEYEGFYVRGFFVTKKKYAVIDEEGKITTRGLEIVRRDWSEIAKETQARVLEAILKHGDVEEAVRIVKEVTEKLSKYEVPPEKLVIHEQITRDLRDYKATGPHVAVAKRLAARGVKIRPGTVISYIVLKGSGRIGDRAIPADEFDPTKHRYDAEYYIENQVLPAVERILKAFGYRKEDLRYQKTKQVGSGAWLKVKGKKGTEAYVEQKLISEEDLNSAVDHHHHHH

SEQ ID NO: 191 - DNA, 2409 bp, Artificial Sequence
  Description of Artificial Sequence:Thermococcus species 9degreesN-7 mutant DNA polymerase, 9degreesN mutant
atgattctcgataccgactacatcaccgagaacgggaagcccgtgataagggtcttcaagaaggagaacggcgagtttaaaatcgagtacgacagaaccttcgagccctacttctacgcccttctgaaggacgattctgcgatagaggacgtcaagaaggtaaccgcaaagaggcacggaacggttgtcaaggtgaagcgcgccgagaaggtgcagaagaagttcctcggcaggccgatagaggtctggaagctctacttcaaccatcctcaggacgtcccggcgattcgagacaggatacgcgcccaccccgctgtcgttgacatctacgagtacgacatacccttcgccaagcgctacctcatcgacaagggcctgattccgatggagggcgacgaggagcttacgatgctcgccttcgcgatcgcaaccctctatcacgagggcgaggagttcggaaccgggccgattctcatgataagctacgccgacgggagcgaggcgagggtgataacctggaagaagattgaccttccgtacgttgacgtcgtctcgaccgagaaggagatgattaagcgcttcctccgcgtcgtcagggagaaggaccccgacgtgctcatcacctacaacggcgacaacttcgacttcgcctacctgaagaagcgctgtgaggaactcggaataaagttcacactcggcagggacgggagcgagccgaagatacagcgaatgggcgaccgctttgccgttgaggtgaagggcaggattcacttcgacctctaccccgtcataaggcgcacgataaacctcccgacctacacccttgaggccgtttacgaggccgtctttggaaagcccaaggagaaggtttacgcagaggagatagcgcaggcctgggagagcggggagggccttgaaagggttgcaagatactcgatggaggacgctaaggtgacctacgagctgggaagggagttcttcccgatggaggcccagctttcgaggcttataggccagagcctctgggacgtctcgcgctcgagcaccggaaatttggtggagtggtcactcctgcggaaggcctacaagaggaacgagctcgccccaaacaagcccgacgagagggagctcgcgagacggcgcgggggctacgctggcgggtacgttaaggaaccagagcggggattgtgggacaacattgtgtatttagacttccgctcgctgtatccttcaatcatcataacccacaacgtctcgccggataccctcaaccgcgagggctgtaaagagtacgacgtcgcccctgaggttggacacaagttctgcaaggacttccccggcttcataccaagcctcctgggagatttgctcgaggagaggcagaagataaagcggaagatgaaggcaacggttgacccgctggagaagaaactcctcgattacaggatgtggcttataaaaatcctcgccaacagcttctacggctactacggctacgccaaggcccggtggtactgcaaggagtgcgccgagagcgttacggcctggggaagggagtatatagaaatggttatccgggaactcgaagaaaaattcggttttaaagttctctatgccgatacagacggtctccatgctaccattcccggagcagacgctgaaacagtcaagaaaaaagcaaaggagttcttaaaatacattaatccaaaactgcccggcctgctcgaacttgagtacgagggcttctacgtgaggggcttcttcgtcacgaagaagaagtacgctgtgatagacgaggagggcaagataaccacgaggggtcttgagattgtgaggcgcgactggagcgagatagcgaaggagacccaggccagggtcttagaggcgatactcaagcacggtgacgtcgaggaggccgttaggatagtcaaggaagtgacggaaaagctgagcaagtatgaggtcccgcccgagaagctggtaatccacgagcagataacgcgcgatttgagggattacaaagccaccggcccgcacgttgccgttgcgaagaggctcgcggcgcgtggagtgaaaatccggcccggcacggtgataagctacatcgtcctaaagggctctggaaggataggcgacagggcgattccagctgatgagttcgacccgacgaagcaccgctacgatgcggaatactacatcgagaaccaggttctcccggcggtggagaggattctaaaagccttcggctatcggaaggaggatttgcgctaccagaagacgaagcaggtcggctcgggcgcgtggctgaaggtgaaggggaagaagggtaccgaagcttacgtagaacaaaaactcatctcagaagaggatctgaatagcgccgtcgaccatcatcatcatcatcattga

SEQ ID NO: 192 - protein, 802 aa, Artificial Sequence
  Description of Artificial Sequence:Thermococcus species 9degreesN-7 mutant DNA polymerase, 9degreesN mutant
MILDTDYITENGKPVIRVFKKENGEFKIEYDRTFEPYFYALLKDDSAIEDVKKVTAKRHGTVVKVKRAEKVQKKFLGRPIEVWKLYFNHPQDVPAIRDRIRAHPAVVDIYEYDIPFAKRYLIDKGLIPMEGDEELTMLAFAIATLYHEGEEFGTGPILMISYADGSEARVITWKKIDLPYVDVVSTEKEMIKRFLRVVREKDPDVLITYNGDNFDFAYLKKRCEELGIKFTLGRDGSEPKIQRMGDRFAVEVKGRIHFDLYPVIRRTINLPTYTLEAVYEAVFGKPKEKVYAEEIAQAWESGEGLERVARYSMEDAKVTYELGREFFPMEAQLSRLIGQSLWDVSRSSTGNLVEWSLLRKAYKRNELAPNKPDERELARRRGGYAGGYVKEPERGLWDNIVYLDFRSLYPSIIITHNVSPDTLNREGCKEYDVAPEVGHKFCKDFPGFIPSLLGDLLEERQKIKRKMKATVDPLEKKLLDYRMWLIKILANSFYGYYGYAKARWYCKECAESVTAWGREYIEMVIRELEEKFGFKVLYADTDGLHATIPGADAETVKKKAKEFLKYINPKLPGLLELEYEGFYVRGFFVTKKKYAVIDEEGKITTRGLEIVRRDWSEIAKETQARVLEAILKHGDVEEAVRIVKEVTEKLSKYEVPPEKLVIHEQITRDLRDYKATGPHVAVAKRLAARGVKIRPGTVISYIVLKGSGRIGDRAIPADEFDPTKHRYDAEYYIENQVLPAVERILKAFGYRKEDLRYQKTKQVGSGAWLKVKGKKGTEAYVEQKLISEEDLNSAVDHHHHHH

SEQ ID NO: 193 - DNA, 2409 bp, Artificial Sequence
  Description of Artificial Sequence:Thermococcus species 9degreesN-7 mutant DNA polymerase, 9degreesN mutant
atgattctcgataccgactacatcaccgagaacgggaagcccgtgataagggtcttcaagaaggagaacggcgagtttaaaatcgagtacgacagaaccttcgagccctacttctacgcccttctgaaggacgattctgcgatagaggacgtcaagaaggtaaccgcaaagaggcacggaacggttgtcaaggtgaagcgcgccgagaaggtgcagaagaagttcctcggcaggccgatagaggtctggaagctctacttcaaccatcctcaggacgtcccggcgattcgagacaggatacgcgcccaccccgctgtcgttgacatctacgagtacgacatacccttcgccaagcgctacctcatcgacaagggcctgattccgatggagggcgacgaggagcttacgatgctcgccttcgcgatcgcaaccctctatcacgagggcgaggagttcggaaccgggccgattctcatgataagctacgccgacgggagcgaggcgagggtgataacctggaagaagattgaccttccgtacgttgacgtcgtctcgaccgagaaggagatgattaagcgcttcctccgcgtcgtcagggagaaggaccccgacgtgctcatcacctacaacggcgacaacttcgacttcgcctacctgaagaagcgctgtgaggaactcggaataaagttcacactcggcagggacgggagcgagccgaagatacagcgaatgggcgaccgctttgccgttgaggtgaagggcaggattcacttcgacctctaccccgtcataaggcgcacgataaacctcccgacctacacccttgaggccgtttacgaggccgtctttggaaagcccaaggagaaggtttacgcagaggagatagcgcaggcctgggagagcggggagggccttgaaagggttgcaagatactcgatggaggacgctaaggtgacctacgagctgggaagggagttcttcccgatggaggcccagctttcgaggcttataggccagagcctctgggacgtctcgcgctcgagcaccggaaatttggtggagtggttcctcctgcggaaggcctacaagaggaacgagctcgccccaaacaagcccgacgagagggagctcgcgagacggcgcgggggctacgctggcgggtacgttaaggaaccagagcggggattgtgggacaacattgtgtatttagacttccgctcgctgtatccttcaatcatcataacccacaacgtctcgccggataccctcaaccgcgagggctgtaaagagtacgacgtcgcccctgaggttggacacaagttctgcaaggacttccccggcatgataccaagcctcctgggagatttgctcgaggagaggcagaagataaagcggaagatgaaggcaacggttgacccgctggagaagaaactcctcgattacaggatgtggcttataaaaatcctcgccaacagcttctacggctactacggctacgccaaggcccggtggtactgcaaggagtgcgccgagagcgttacggcctggggaagggagtatatagaaatggttatccgggaactcgaagaaaaattcggttttaaagttctctatgccgatacagacggtctccatgctaccattcccggagcagacgctgaaacagtcaagaaaaaagcaaaggagttcttaaaatacattaatccaaaactgcccggcctgctcgaacttgagtacgagggcttctacgtgaggggcttcttcgtcacgaagaagaagtacgctgtgatagacgaggagggcaagataaccacgaggggtcttgagattgtgaggcgcgactggagcgagatagcgaaggagacccaggccagggtcttagaggcgatactcaagcacggtgacgtcgaggaggccgttaggatagtcaaggaagtgacggaaaagctgagcaagtatgaggtcccgcccgagaagctggtaatccacgagcagataacgcgcgatttgagggattacaaagccaccggcccgcacgttgccgttgcgaagaggctcgcggcgcgtggagtgaaaatccggcccggcacggtgataagctacatcgtcctaaagggctctggaaggataggcgacagggcgattccagctgatgagttcgacccgacgaagcaccgctacgatgcggaatactacatcgagaaccaggttctcccggcggtggagaggattctaaaagccttcggctatcggaaggaggatttgcgctaccagaagacgaagcaggtcggctcgggcgcgtggctgaaggtgaaggggaagaagggtaccgaagcttacgtagaacaaaaactcatctcagaagaggatctgaatagcgccgtcgaccatcatcatcatcatcattga

SEQ ID NO: 194 - protein, 802 aa, Artificial Sequence
  Description of Artificial Sequence:Thermococcus species 9degreesN-7 mutant DNA polymerase, 9degreesN mutant
MILDTDYITENGKPVIRVFKKENGEFKIEYDRTFEPYFYALLKDDSAIEDVKKVTAKRHGTVVKVKRAEKVQKKFLGRPIEVWKLYFNHPQDVPAIRDRIRAHPAVVDIYEYDIPFAKRYLIDKGLIPMEGDEELTMLAFAIATLYHEGEEFGTGPILMISYADGSEARVITWKKIDLPYVDVVSTEKEMIKRFLRVVREKDPDVLITYNGDNFDFAYLKKRCEELGIKFTLGRDGSEPKIQRMGDRFAVEVKGRIHFDLYPVIRRTINLPTYTLEAVYEAVFGKPKEKVYAEEIAQAWESGEGLERVARYSMEDAKVTYELGREFFPMEAQLSRLIGQSLWDVSRSSTGNLVEWFLLRKAYKRNELAPNKPDERELARRRGGYAGGYVKEPERGLWDNIVYLDFRSLYPSIIITHNVSPDTLNREGCKEYDVAPEVGHKFCKDFPGMIPSLLGDLLEERQKIKRKMKATVDPLEKKLLDYRMWLIKILANSFYGYYGYAKARWYCKECAESVTAWGREYIEMVIRELEEKFGFKVLYADTDGLHATIPGADAETVKKKAKEFLKYINPKLPGLLELEYEGFYVRGFFVTKKKYAVIDEEGKITTRGLEIVRRDWSEIAKETQARVLEAILKHGDVEEAVRIVKEVTEKLSKYEVPPEKLVIHEQITRDLRDYKATGPHVAVAKRLAARGVKIRPGTVISYIVLKGSGRIGDRAIPADEFDPTKHRYDAEYYIENQVLPAVERILKAFGYRKEDLRYQKTKQVGSGAWLKVKGKKGTEAYVEQKLISEEDLNSAVDHHHHHH

SEQ ID NO: 195 - DNA, 2409 bp, Artificial Sequence
  Description of Artificial Sequence:Thermococcus species 9degreesN-7 mutant DNA polymerase, 9degreesN mutant
atgattctcgataccgactacatcaccgagaacgggaagcccgtgataagggtcttcaagaaggagaacggcgagtttaaaatcgagtacgacagaaccttcgagccctacttctacgcccttctgaaggacgattctgcgatagaggacgtcaagaaggtaaccgcaaagaggcacggaacggttgtcaaggtgaagcgcgccgagaaggtgcagaagaagttcctcggcaggccgatagaggtctggaagctctacttcaaccatcctcaggacgtcccggcgattcgagacaggatacgcgcccaccccgctgtcgttgacatctacgagtacgacatacccttcgccaagcgctacctcatcgacaagggcctgattccgatggagggcgacgaggagcttacgatgctcgccttcgcgatcgcaaccctctatcacgagggcgaggagttcggaaccgggccgattctcatgataagctacgccgacgggagcgaggcgagggtgataacctggaagaagattgaccttccgtacgttgacgtcgtctcgaccgagaaggagatgattaagcgcttcctccgcgtcgtcagggagaaggaccccgacgtgctcatcacctacaacggcgacaacttcgacttcgcctacctgaagaagcgctgtgaggaactcggaataaagttcacactcggcagggacgggagcgagccgaagatacagcgaatgggcgaccgctttgccgttgaggtgaagggcaggattcacttcgacctctaccccgtcataaggcgcacgataaacctcccgacctacacccttgaggccgtttacgaggccgtctttggaaagcccaaggagaaggtttacgcagaggagatagcgcaggcctgggagagcggggagggccttgaaagggttgcaagatactcgatggaggacgctaaggtgacctacgagctgggaagggagttcttcccgatggaggcccagctttcgaggcttataggccagagcctctgggacgtctcgcgctcgagcaccggaaatttggtggagtggttcctcctgcggaaggcctacaagaggaacgagctcgccccaaacaagcccgacgagagggagctcgcgagacggcgcgggggctacgctggcgggtacgttaaggaaccagagcggggattgtgggacaacattgtgtatttagacttccgctcgctgtatccttcaatcatcataacccacaacgtctcgccggataccctcaaccgcgagggctgtaaagagtacgacgtcgcccctgaggttggacacaagttctgcaaggacttccccggcttcataccaagcctcctgggagatttgctcgaggagaggcagaagataaagcggaagatgaaggcaacggttgacccgctggagaagaaactcctcgattacaggatgtggcttataaaaatcctcgccaacagcgtctacggctactacggctacgccaaggcccggtggtactgcaaggagtgcgccgagagcgttacggcctggggaagggagtatatagaaatggttatccgggaactcgaagaaaaattcggttttaaagttctctatgccgatacagacggtctccatgctaccattcccggagcagacgctgaaacagtcaagaaaaaagcaaaggagttcttaaaatacattaatccaaaactgcccggcctgctcgaacttgagtacgagggcttctacgtgaggggcttcttcgtcacgaagaagaagtacgctgtgatagacgaggagggcaagataaccacgaggggtcttgagattgtgaggcgcgactggagcgagatagcgaaggagacccaggccagggtcttagaggcgatactcaagcacggtgacgtcgaggaggccgttaggatagtcaaggaagtgacggaaaagctgagcaagtatgaggtcccgcccgagaagctggtaatccacgagcagataacgcgcgatttgagggattacaaagccaccggcccgcacgttgccgttgcgaagaggctcgcggcgcgtggagtgaaaatccggcccggcacggtgataagctacatcgtcctaaagggctctggaaggataggcgacagggcgattccagctgatgagttcgacccgacgaagcaccgctacgatgcggaatactacatcgagaaccaggttctcccggcggtggagaggattctaaaagccttcggctatcggaaggaggatttgcgctaccagaagacgaagcaggtcggctcgggcgcgtggctgaaggtgaaggggaagaagggtaccgaagcttacgtagaacaaaaactcatctcagaagaggatctgaatagcgccgtcgaccatcatcatcatcatcattga

SEQ ID NO: 196 - protein, 802 aa, Artificial Sequence
  Description of Artificial Sequence:Thermococcus species 9degreesN-7 mutant DNA polymerase, 9degreesN mutant
MILDTDYITENGKPVIRVFKKENGEFKIEYDRTFEPYFYALLKDDSAIEDVKKVTAKRHGTVVKVKRAEKVQKKFLGRPIEVWKLYFNHPQDVPAIRDRIRAHPAVVDIYEYDIPFAKRYLIDKGLIPMEGDEELTMLAFAIATLYHEGEEFGTGPILMISYADGSEARVITWKKIDLPYVDVVSTEKEMIKRFLRVVREKDPDVLITYNGDNFDFAYLKKRCEELGIKFTLGRDGSEPKIQRMGDRFAVEVKGRIHFDLYPVIRRTINLPTYTLEAVYEAVFGKPKEKVYAEEIAQAWESGEGLERVARYSMEDAKVTYELGREFFPMEAQLSRLIGQSLWDVSRSSTGNLVEWFLLRKAYKRNELAPNKPDERELARRRGGYAGGYVKEPERGLWDNIVYLDFRSLYPSIIITHNVSPDTLNREGCKEYDVAPEVGHKFCKDFPGFIPSLLGDLLEERQKIKRKMKATVDPLEKKLLDYRMWLIKILANSVYGYYGYAKARWYCKECAESVTAWGREYIEMVIRELEEKFGFKVLYADTDGLHATIPGADAETVKKKAKEFLKYINPKLPGLLELEYEGFYVRGFFVTKKKYAVIDEEGKITTRGLEIVRRDWSEIAKETQARVLEAILKHGDVEEAVRIVKEVTEKLSKYEVPPEKLVIHEQITRDLRDYKATGPHVAVAKRLAARGVKIRPGTVISYIVLKGSGRIGDRAIPADEFDPTKHRYDAEYYIENQVLPAVERILKAFGYRKEDLRYQKTKQVGSGAWLKVKGKKGTEAYVEQKLISEEDLNSAVDHHHHHH

SEQ ID NO: 197 - DNA, 2409 bp, Artificial Sequence
  Description of Artificial Sequence:Thermococcus species 9degreesN-7 mutant DNA polymerase, 9degreesN mutant
atgattctcgataccgactacatcaccgagaacgggaagcccgtgataagggtcttcaagaaggagaacggcgagtttaaaatcgagtacgacagaaccttcgagccctacttctacgcccttctgaaggacgattctgcgatagaggacgtcaagaaggtaaccgcaaagaggcacggaacggttgtcaaggtgaagcgcgccgagaaggtgcagaagaagttcctcggcaggccgatagaggtctggaagctctacttcaaccatcctcaggacgtcccggcgattcgagacaggatacgcgcccaccccgctgtcgttgacatctacgagtacgacatacccttcgccaagcgctacctcatcgacaagggcctgattccgatggagggcgacgaggagcttacgatgctcgccttcgcgatcgcaaccctctatcacgagggcgaggagttcggaaccgggccgattctcatgataagctacgccgacgggagcgaggcgagggtgataacctggaagaagattgaccttccgtacgttgacgtcgtctcgaccgagaaggagatgattaagcgcttcctccgcgtcgtcagggagaaggaccccgacgtgctcatcacctacaacggcgacaacttcgacttcgcctacctgaagaagcgctgtgaggaactcggaataaagttcacactcggcagggacgggagcgagccgaagatacagcgaatgggcgaccgctttgccgttgaggtgaagggcaggattcacttcgacctctaccccgtcataaggcgcacgataaacctcccgacctacacccttgaggccgtttacgaggccgtctttggaaagcccaaggagaaggtttacgcagaggagatagcgcaggcctgggagagcggggagggccttgaaagggttgcaagatactcgatggaggacgctaaggtgacctacgagctgggaagggagttcttcccgatggaggcccagctttcgaggcttataggccagagcctctgggacgtctcgcgctcgagcaccggaaatttggtggagtggttcctcctgcggaaggcctacaagaggaacgagctcgccccaaacaagcccgacgagagggagctcgcgagacggcgcgggggctacgctggcgggtacgttaaggaaccagagcggggattgtgggacaacattgtgtatttagacttccgctcgctgtatccttcaatcatcataacccacaacgtctcgccggataccctcaaccgcgagggctgtaaagagtacgacgtcgcccctgaggttggacacaagttctgcaaggacttccccggcttcataccaagcctcctgggagatttgctcgaggagaggcagaagataaagcggaagatgaaggcaacggttgacccgctggagaagaaactcctcgattacaggatgtggcttataaaaatcctcgccaacagcacctacggctactacggctacgccaaggcccggtggtactgcaaggagtgcgccgagagcgttacggcctggggaagggagtatatagaaatggttatccgggaactcgaagaaaaattcggttttaaagttctctatgccgatacagacggtctccatgctaccattcccggagcagacgctgaaacagtcaagaaaaaagcaaaggagttcttaaaatacattaatccaaaactgcccggcctgctcgaacttgagtacgagggcttctacgtgaggggcttcttcgtcacgaagaagaagtacgctgtgatagacgaggagggcaagataaccacgaggggtcttgagattgtgaggcgcgactggagcgagatagcgaaggagacccaggccagggtcttagaggcgatactcaagcacggtgacgtcgaggaggccgttaggatagtcaaggaagtgacggaaaagctgagcaagtatgaggtcccgcccgagaagctggtaatccacgagcagataacgcgcgatttgagggattacaaagccaccggcccgcacgttgccgttgcgaagaggctcgcggcgcgtggagtgaaaatccggcccggcacggtgataagctacatcgtcctaaagggctctggaaggataggcgacagggcgattccagctgatgagttcgacccgacgaagcaccgctacgatgcggaatactacatcgagaaccaggttctcccggcggtggagaggattctaaaagccttcggctatcggaaggaggatttgcgctaccagaagacgaagcaggtcggctcgggcgcgtggctgaaggtgaaggggaagaagggtaccgaagcttacgtagaacaaaaactcatctcagaagaggatctgaatagcgccgtcgaccatcatcatcatcatcattga

SEQ ID NO: 198 - protein, 802 aa, Artificial Sequence
  Description of Artificial Sequence:Thermococcus species 9degreesN-7 mutant DNA polymerase, 9degreesN mutant
MILDTDYITENGKPVIRVFKKENGEFKIEYDRTFEPYFYALLKDDSAIEDVKKVTAKRHGTVVKVKRAEKVQKKFLGRPIEVWKLYFNHPQDVPAIRDRIRAHPAVVDIYEYDIPFAKRYLIDKGLIPMEGDEELTMLAFAIATLYHEGEEFGTGPILMISYADGSEARVITWKKIDLPYVDVVSTEKEMIKRFLRVVREKDPDVLITYNGDNFDFAYLKKRCEELGIKFTLGRDGSEPKIQRMGDRFAVEVKGRIHFDLYPVIRRTINLPTYTLEAVYEAVFGKPKEKVYAEEIAQAWESGEGLERVARYSMEDAKVTYELGREFFPMEAQLSRLIGQSLWDVSRSSTGNLVEWFLLRKAYKRNELAPNKPDERELARRRGGYAGGYVKEPERGLWDNIVYLDFRSLYPSIIITHNVSPDTLNREGCKEYDVAPEVGHKFCKDFPGFIPSLLGDLLEERQKIKRKMKATVDPLEKKLLDYRMWLIKILANSTYGYYGYAKARWYCKECAESVTAWGREYIEMVIRELEEKFGFKVLYADTDGLHATIPGADAETVKKKAKEFLKYINPKLPGLLELEYEGFYVRGFFVTKKKYAVIDEEGKITTRGLEIVRRDWSEIAKETQARVLEAILKHGDVEEAVRIVKEVTEKLSKYEVPPEKLVIHEQITRDLRDYKATGPHVAVAKRLAARGVKIRPGTVISYIVLKGSGRIGDRAIPADEFDPTKHRYDAEYYIENQVLPAVERILKAFGYRKEDLRYQKTKQVGSGAWLKVKGKKGTEAYVEQKLISEEDLNSAVDHHHHHH

SEQ ID NO: 199 - DNA, 2409 bp, Artificial Sequence
  Description of Artificial Sequence:Thermococcus species 9degreesN-7 mutant DNA polymerase, 9degreesN mutant
atgattctcgataccgactacatcaccgagaacgggaagcccgtgataagggtcttcaagaaggagaacggcgagtttaaaatcgagtacgacagaaccttcgagccctacttctacgcccttctgaaggacgattctgcgatagaggacgtcaagaaggtaaccgcaaagaggcacggaacggttgtcaaggtgaagcgcgccgagaaggtgcagaagaagttcctcggcaggccgatagaggtctggaagctctacttcaaccatcctcaggacgtcccggcgattcgagacaggatacgcgcccaccccgctgtcgttgacatctacgagtacgacatacccttcgccaagcgctacctcatcgacaagggcctgattccgatggagggcgacgaggagcttacgatgctcgccttcgcgatcgcaaccctctatcacgagggcgaggagttcggaaccgggccgattctcatgataagctacgccgacgggagcgaggcgagggtgataacctggaagaagattgaccttccgtacgttgacgtcgtctcgaccgagaaggagatgattaagcgcttcctccgcgtcgtcagggagaaggaccccgacgtgctcatcacctacaacggcgacaacttcgacttcgcctacctgaagaagcgctgtgaggaactcggaataaagttcacactcggcagggacgggagcgagccgaagatacagcgaatgggcgaccgctttgccgttgaggtgaagggcaggattcacttcgacctctaccccgtcataaggcgcacgataaacctcccgacctacacccttgaggccgtttacgaggccgtctttggaaagcccaaggagaaggtttacgcagaggagatagcgcaggcctgggagagcggggagggccttgaaagggttgcaagatactcgatggaggacgctaaggtgacctacgagctgggaagggagttcttcccgatggaggcccagctttcgaggcttataggccagagcctctgggacgtctcgcgctcgagcaccggaaatttggtggagtggttcctcctgcggaaggcctacctcaggaacgagctcgccccaaacaagcccgacgagagggagctcgcgagacggcgcgggggctacgctggcgggtacgttaaggaaccagagcggggattgtgggacaacattgtgtatttagacttccgctcgctgtatccttcaatcatcataacccacaacgtctcgccggataccctcaaccgcgagggctgtaaagagtacgacgtcgcccctgaggttggacacaagttctgcaaggacttccccggcttctatccaagcctcctgggagatttgctcgaggagaggcagaagataaagcggaagatgaaggcaacggttgacccgctggagaagaaactcctcgattacaggatgtggcttataaaaatcctcgccaacagcttctacggctactacggctacgccaaggcccggtggtactgcaaggagtgcgccgagagcgttacggcctggggaagggagtatatagaaatggttatccgggaactcgaagaaaaattcggttttaaagttctctatgccgatacagacggtctccatgctaccattcccggagcagacgctgaaacagtcaagaaaaaagcaaaggagttcttaaaatacattaatccaaaactgcccggcctgctcgaacttgagtacgagggcttctacgtgaggggcttcttcgtcacgaagaagaagtacgctgtgatagacgaggagggcaagataaccacgaggggtcttgagattgtgaggcgcgactggagcgagatagcgaaggagacccaggccagggtcttagaggcgatactcaagcacggtgacgtcgaggaggccgttaggatagtcaaggaagtgacggaaaagctgagcaagtatgaggtcccgcccgagaagctggtaatccacgagcagataacgcgcgatttgagggattacaaagccaccggcccgcacgttgccgttgcgaagaggctcgcggcgcgtggagtgaaaatccggcccggcacggtgataagctacatcgtcctaaagggctctggaaggataggcgacagggcgattccagctgatgagttcgacccgacgaagcaccgctacgatgcggaatactacatcgagaaccaggttctcccggcggtggagaggattctaaaagccttcggctatcggaaggaggatttgcgctaccagaagacgaagcaggtcggctcgggcgcgtggctgaaggtgaaggggaagaagggtaccgaagcttacgtagaacaaaaactcatctcagaagaggatctgaatagcgccgtcgaccatcatcatcatcatcattga

SEQ ID NO: 200 - protein, 802 aa, Artificial Sequence
  Description of Artificial Sequence:Thermococcus species 9degreesN-7 mutant DNA polymerase, 9degreesN mutant
MILDTDYITENGKPVIRVFKKENGEFKIEYDRTFEPYFYALLKDDSAIEDVKKVTAKRHGTVVKVKRAEKVQKKFLGRPIEVWKLYFNHPQDVPAIRDRIRAHPAVVDIYEYDIPFAKRYLIDKGLIPMEGDEELTMLAFAIATLYHEGEEFGTGPILMISYADGSEARVITWKKIDLPYVDVVSTEKEMIKRFLRVVREKDPDVLITYNGDNFDFAYLKKRCEELGIKFTLGRDGSEPKIQRMGDRFAVEVKGRIHFDLYPVIRRTINLPTYTLEAVYEAVFGKPKEKVYAEEIAQAWESGEGLERVARYSMEDAKVTYELGREFFPMEAQLSRLIGQSLWDVSRSSTGNLVEWFLLRKAYLRNELAPNKPDERELARRRGGYAGGYVKEPERGLWDNIVYLDFRSLYPSIIITHNVSPDTLNREGCKEYDVAPEVGHKFCKDFPGFYPSLLGDLLEERQKIKRKMKATVDPLEKKLLDYRMWLIKILANSFYGYYGYAKARWYCKECAESVTAWGREYIEMVIRELEEKFGFKVLYADTDGLHATIPGADAETVKKKAKEFLKYINPKLPGLLELEYEGFYVRGFFVTKKKYAVIDEEGKITTRGLEIVRRDWSEIAKETQARVLEAILKHGDVEEAVRIVKEVTEKLSKYEVPPEKLVIHEQITRDLRDYKATGPHVAVAKRLAARGVKIRPGTVISYIVLKGSGRIGDRAIPADEFDPTKHRYDAEYYIENQVLPAVERILKAFGYRKEDLRYQKTKQVGSGAWLKVKGKKGTEAYVEQKLISEEDLNSAVDHHHHHH

SEQ ID NO: 201 - DNA, 2409 bp, Artificial Sequence
  Description of Artificial Sequence:Thermococcus species 9degreesN-7 mutant DNA polymerase, 9degreesN mutant
atgattctcgataccgactacatcaccgagaacgggaagcccgtgataagggtcttcaagaaggagaacggcgagtttaaaatcgagtacgacagaaccttcgagccctacttctacgcccttctgaaggacgattctgcgatagaggacgtcaagaaggtaaccgcaaagaggcacggaacggttgtcaaggtgaagcgcgccgagaaggtgcagaagaagttcctcggcaggccgatagaggtctggaagctctacttcaaccatcctcaggacgtcccggcgattcgagacaggatacgcgcccaccccgctgtcgttgacatctacgagtacgacatacccttcgccaagcgctacctcatcgacaagggcctgattccgatggagggcgacgaggagcttacgatgctcgccttcgcgatcgcaaccctctatcacgagggcgaggagttcggaaccgggccgattctcatgataagctacgccgacgggagcgaggcgagggtgataacctggaagaagattgaccttccgtacgttgacgtcgtctcgaccgagaaggagatgattaagcgcttcctccgcgtcgtcagggagaaggaccccgacgtgctcatcacctacaacggcgacaacttcgacttcgcctacctgaagaagcgctgtgaggaactcggaataaagttcacactcggcagggacgggagcgagccgaagatacagcgaatgggcgaccgctttgccgttgaggtgaagggcaggattcacttcgacctctaccccgtcataaggcgcacgataaacctcccgacctacacccttgaggccgtttacgaggccgtctttggaaagcccaaggagaaggtttacgcagaggagatagcgcaggcctgggagagcggggagggccttgaaagggttgcaagatactcgatggaggacgctaaggtgacctacgagctgggaagggagttcttcccgatggaggcccagctttcgaggcttataggccagagcctctgggacgtctcgcgctcgagcaccggaaatttggtggagtggttcctcctgcggaaggcctacgctaggaacgagctcgccccaaacaagcccgacgagagggagctcgcgagacggcgcgggggctacgctggcgggtacgttaaggaaccagagcggggattgtgggacaacattgtgtatttagacttccgctcgctgtatccttcaatcatcataacccacaacgtctcgccggataccctcaaccgcgagggctgtaaagagtacgacgtcgcccctgaggttggacacaagttctgcaaggacttccccggcttcataccaagcctcctgggagatttgctcgaggagaggcagaagataaagcggaagatgaaggcaacggttgacccgctggagaagaaactcctcgattacaggatgtggcttataaaaatcctcgccaacagcttctacggctactacggctacgccaaggcccggtggtactgcaaggagtgcgccgagagcgttacggcctggggaagggagtatatagaaatggttatccgggaactcgaagaaaaattcggttttaaagttctctatgccgatacagacggtctccatgctaccattcccggagcagacgctgaaacagtcaagaaaaaagcaaaggagttcttaaaatacattaatccaaaactgcccggcctgctcgaacttgagtacgagggcttctacgtgaggggcttcttcgtcacgaagaagaagtacgctgtgatagacgaggagggcaagataaccacgaggggtcttgagattgtgaggcgcgactggagcgagatagcgaaggagacccaggccagggtcttagaggcgatactcaagcacggtgacgtcgaggaggccgttaggatagtcaaggaagtgacggaaaagctgagcaagtatgaggtcccgcccgagaagctggtaatccacgagcagataacgcgcgatttgagggattacaaagccaccggcccgcacgttgccgttgcgaagaggctcgcggcgcgtggagtgaaaatccggcccggcacggtgataagctacatcgtcctaaagggctctggaaggataggcgacagggcgattccagctgatgagttcgacccgacgaagcaccgctacgatgcggaatactacatcgagaaccaggttctcccggcggtggagaggattctaaaagccttcggctatcggaaggaggatttgcgctaccagaagacgaagcaggtcggctcgggcgcgtggctgaaggtgaaggggaagaagggtaccgaagcttacgtagaacaaaaactcatctcagaagaggatctgaatagcgccgtcgaccatcatcatcatcatcattga

SEQ ID NO: 202 - protein, 802 aa, Artificial Sequence
  Description of Artificial Sequence:Thermococcus species 9degreesN-7 mutant DNA polymerase, 9degreesN mutant
MILDTDYITENGKPVIRVFKKENGEFKIEYDRTFEPYFYALLKDDSAIEDVKKVTAKRHGTVVKVKRAEKVQKKFLGRPIEVWKLYFNHPQDVPAIRDRIRAHPAVVDIYEYDIPFAKRYLIDKGLIPMEGDEELTMLAFAIATLYHEGEEFGTGPILMISYADGSEARVITWKKIDLPYVDVVSTEKEMIKRFLRVVREKDPDVLITYNGDNFDFAYLKKRCEELGIKFTLGRDGSEPKIQRMGDRFAVEVKGRIHFDLYPVIRRTINLPTYTLEAVYEAVFGKPKEKVYAEEIAQAWESGEGLERVARYSMEDAKVTYELGREFFPMEAQLSRLIGQSLWDVSRSSTGNLVEWFLLRKAYARNELAPNKPDERELARRRGGYAGGYVKEPERGLWDNIVYLDFRSLYPSIIITHNVSPDTLNREGCKEYDVAPEVGHKFCKDFPGFIPSLLGDLLEERQKIKRKMKATVDPLEKKLLDYRMWLIKILANSFYGYYGYAKARWYCKECAESVTAWGREYIEMVIRELEEKFGFKVLYADTDGLHATIPGADAETVKKKAKEFLKYINPKLPGLLELEYEGFYVRGFFVTKKKYAVIDEEGKITTRGLEIVRRDWSEIAKETQARVLEAILKHGDVEEAVRIVKEVTEKLSKYEVPPEKLVIHEQITRDLRDYKATGPHVAVAKRLAARGVKIRPGTVISYIVLKGSGRIGDRAIPADEFDPTKHRYDAEYYIENQVLPAVERILKAFGYRKEDLRYQKTKQVGSGAWLKVKGKKGTEAYVEQKLISEEDLNSAVDHHHHHH

SEQ ID NO: 203 - DNA, 2409 bp, Artificial Sequence
  Description of Artificial Sequence:Thermococcus species 9degreesN-7 mutant DNA polymerase, 9degreesN mutant
atgattctcgataccgactacatcaccgagaacgggaagcccgtgataagggtcttcaagaaggagaacggcgagtttaaaatcgagtacgacagaaccttcgagccctacttctacgcccttctgaaggacgattctgcgatagaggacgtcaagaaggtaaccgcaaagaggcacggaacggttgtcaaggtgaagcgcgccgagaaggtgcagaagaagttcctcggcaggccgatagaggtctggaagctctacttcaaccatcctcaggacgtcccggcgattcgagacaggatacgcgcccaccccgctgtcgttgacatctacgagtacgacatacccttcgccaagcgctacctcatcgacaagggcctgattccgatggagggcgacgaggagcttacgatgctcgccttcgcgatcgcaaccctctatcacgagggcgaggagttcggaaccgggccgattctcatgataagctacgccgacgggagcgaggcgagggtgataacctggaagaagattgaccttccgtacgttgacgtcgtctcgaccgagaaggagatgattaagcgcttcctccgcgtcgtcagggagaaggaccccgacgtgctcatcacctacaacggcgacaacttcgacttcgcctacctgaagaagcgctgtgaggaactcggaataaagttcacactcggcagggacgggagcgagccgaagatacagcgaatgggcgaccgctttgccgttgaggtgaagggcaggattcacttcgacctctaccccgtcataaggcgcacgataaacctcccgacctacacccttgaggccgtttacgaggccgtctttggaaagcccaaggagaaggtttacgcagaggagatagcgcaggcctgggagagcggggagggccttgaaagggttgcaagatactcgatggaggacgctaaggtgacctacgagctgggaagggagttcttcccgatggaggcccagctttcgaggcttataggccagagcctctgggacgtctcgcgctcgagcaccggaaatttggtggagtggttcctcctgcggaaggcctacggaaggaacgagctcgccccaaacaagcccgacgagagggagctcgcgagacggcgcgggggctacgctggcgggtacgttaaggaaccagagcggggattgtgggacaacattgtgtatttagacttccgctcgctgtatccttcaatcatcataacccacaacgtctcgccggataccctcaaccgcgagggctgtaaagagtacgacgtcgcccctgaggttggacacaagttctgcaaggacttccccggcttcataccaagcctcctgggagatttgctcgaggagaggcagaagataaagcggaagatgaaggcaacggttgacccgctggagaagaaactcctcgattacaggatgtggcttataaaaatcctcgccaacagcttctacggctactacggctacgccaaggcccggtggtactgcaaggagtgcgccgagagcgttacggcctggggaagggagtatatagaaatggttatccgggaactcgaagaaaaattcggttttaaagttctctatgccgatacagacggtctccatgctaccattcccggagcagacgctgaaacagtcaagaaaaaagcaaaggagttcttaaaatacattaatccaaaactgcccggcctgctcgaacttgagtacgagggcttctacgtgaggggcttcttcgtcacgaagaagaagtacgctgtgatagacgaggagggcaagataaccacgaggggtcttgagattgtgaggcgcgactggagcgagatagcgaaggagacccaggccagggtcttagaggcgatactcaagcacggtgacgtcgaggaggccgttaggatagtcaaggaagtgacggaaaagctgagcaagtatgaggtcccgcccgagaagctggtaatccacgagcagataacgcgcgatttgagggattacaaagccaccggcccgcacgttgccgttgcgaagaggctcgcggcgcgtggagtgaaaatccggcccggcacggtgataagctacatcgtcctaaagggctctggaaggataggcgacagggcgattccagctgatgagttcgacccgacgaagcaccgctacgatgcggaatactacatcgagaaccaggttctcccggcggtggagaggattctaaaagccttcggctatcggaaggaggatttgcgctaccagaagacgaagcaggtcggctcgggcgcgtggctgaaggtgaaggggaagaagggtaccgaagcttacgtagaacaaaaactcatctcagaagaggatctgaatagcgccgtcgaccatcatcatcatcatcattga

SEQ ID NO: 204 - protein, 802 aa, Artificial Sequence
  Description of Artificial Sequence:Thermococcus species 9degreesN-7 mutant DNA polymerase, 9degreesN mutant
MILDTDYITENGKPVIRVFKKENGEFKIEYDRTFEPYFYALLKDDSAIEDVKKVTAKRHGTVVKVKRAEKVQKKFLGRPIEVWKLYFNHPQDVPAIRDRIRAHPAVVDIYEYDIPFAKRYLIDKGLIPMEGDEELTMLAFAIATLYHEGEEFGTGPILMISYADGSEARVITWKKIDLPYVDVVSTEKEMIKRFLRVVREKDPDVLITYNGDNFDFAYLKKRCEELGIKFTLGRDGSEPKIQRMGDRFAVEVKGRIHFDLYPVIRRTINLPTYTLEAVYEAVFGKPKEKVYAEEIAQAWESGEGLERVARYSMEDAKVTYELGREFFPMEAQLSRLIGQSLWDVSRSSTGNLVEWFLLRKAYGRNELAPNKPDERELARRRGGYAGGYVKEPERGLWDNIVYLDFRSLYPSIIITHNVSPDTLNREGCKEYDVAPEVGHKFCKDFPGFIPSLLGDLLEERQKIKRKMKATVDPLEKKLLDYRMWLIKILANSFYGYYGYAKARWYCKECAESVTAWGREYIEMVIRELEEKFGFKVLYADTDGLHATIPGADAETVKKKAKEFLKYINPKLPGLLELEYEGFYVRGFFVTKKKYAVIDEEGKITTRGLEIVRRDWSEIAKETQARVLEAILKHGDVEEAVRIVKEVTEKLSKYEVPPEKLVIHEQITRDLRDYKATGPHVAVAKRLAARGVKIRPGTVISYIVLKGSGRIGDRAIPADEFDPTKHRYDAEYYIENQVLPAVERILKAFGYRKEDLRYQKTKQVGSGAWLKVKGKKGTEAYVEQKLISEEDLNSAVDHHHHHH

SEQ ID NO: 205 - DNA, 2409 bp, Artificial Sequence
  Description of Artificial Sequence:Thermococcus species 9degreesN-7 mutant DNA polymerase, 9degreesN mutant
atgattctcgataccgactacatcaccgagaacgggaagcccgtgataagggtcttcaagaaggagaacggcgagtttaaaatcgagtacgacagaaccttcgagccctacttctacgcccttctgaaggacgattctgcgatagaggacgtcaagaaggtaaccgcaaagaggcacggaacggttgtcaaggtgaagcgcgccgagaaggtgcagaagaagttcctcggcaggccgatagaggtctggaagctctacttcaaccatcctcaggacgtcccggcgattcgagacaggatacgcgcccaccccgctgtcgttgacatctacgagtacgacatacccttcgccaagcgctacctcatcgacaagggcctgattccgatggagggcgacgaggagcttacgatgctcgccttcgcgatcgcaaccctctatcacgagggcgaggagttcggaaccgggccgattctcatgataagctacgccgacgggagcgaggcgagggtgataacctggaagaagattgaccttccgtacgttgacgtcgtctcgaccgagaaggagatgattaagcgcttcctccgcgtcgtcagggagaaggaccccgacgtgctcatcacctacaacggcgacaacttcgacttcgcctacctgaagaagcgctgtgaggaactcggaataaagttcacactcggcagggacgggagcgagccgaagatacagcgaatgggcgaccgctttgccgttgaggtgaagggcaggattcacttcgacctctaccccgtcataaggcgcacgataaacctcccgacctacacccttgaggccgtttacgaggccgtctttggaaagcccaaggagaaggtttacgcagaggagatagcgcaggcctgggagagcggggagggccttgaaagggttgcaagatactcgatggaggacgctaaggtgacctacgagctgggaagggagttcttcccgatggaggcccagctttcgaggcttataggccagagcctctgggacgtctcgcgctcgagcaccggaaatttggtggagtggttcctcctgcggaaggcctacaagaggaacgagctcgccccaaacaagcccgacgagagggagctcgcgagacggcgcgggggctacgctggcgggtacgttaaggaaccagagcggggattgtgggacaacattgtgtatttagacttccgctcgctgtatccttcaatcatcataacccacaacgtctcgccggataccctcaaccgcgagggctgtaaagagtacgacgtcgcccctgaggttggacacaagttctgcaaggacttccccggcttcataccaagcctcctgggagatttgctcgaggagaggcagaagataaagcggaagatgaaggcaacggttgacccgctggagaagcgtctcctcgattacaggatgtggcttataaaaatcctcgccaacagcttctacggctactacggctacgccaaggcccggtggtactgcaaggagtgcgccgagagcgttacggcctggggaagggagtatatagaaatggttatccgggaactcgaagaaaaattcggttttaaagttctctatgccgatacagacggtctccatgctaccattcccggagcagacgctgaaacagtcaagaaaaaagcaaaggagttcttaaaatacattaatccaaaactgcccggcctgctcgaacttgagtacgagggcttctacgtgaggggcttcttcgtcacgaagaagaagtacgctgtgatagacgaggagggcaagataaccacgaggggtcttgagattgtgaggcgcgactggagcgagatagcgaaggagacccaggccagggtcttagaggcgatactcaagcacggtgacgtcgaggaggccgttaggatagtcaaggaagtgacggaaaagctgagcaagtatgaggtcccgcccgagaagctggtaatccacgagcagataacgcgcgatttgagggattacaaagccaccggcccgcacgttgccgttgcgaagaggctcgcggcgcgtggagtgaaaatccggcccggcacggtgataagctacatcgtcctaaagggctctggaaggataggcgacagggcgattccagctgatgagttcgacccgacgaagcaccgctacgatgcggaatactacatcgagaaccaggttctcccggcggtggagaggattctaaaagccttcggctatcggaaggaggatttgcgctaccagaagacgaagcaggtcggctcgggcgcgtggctgaaggtgaaggggaagaagggtaccgaagcttacgtagaacaaaaactcatctcagaagaggatctgaatagcgccgtcgaccatcatcatcatcatcattga

SEQ ID NO: 206 - protein, 802 aa, Artificial Sequence
  Description of Artificial Sequence:Thermococcus species 9degreesN-7 mutant DNA polymerase, 9degreesN mutant
MILDTDYITENGKPVIRVFKKENGEFKIEYDRTFEPYFYALLKDDSAIEDVKKVTAKRHGTVVKVKRAEKVQKKFLGRPIEVWKLYFNHPQDVPAIRDRIRAHPAVVDIYEYDIPFAKRYLIDKGLIPMEGDEELTMLAFAIATLYHEGEEFGTGPILMISYADGSEARVITWKKIDLPYVDVVSTEKEMIKRFLRVVREKDPDVLITYNGDNFDFAYLKKRCEELGIKFTLGRDGSEPKIQRMGDRFAVEVKGRIHFDLYPVIRRTINLPTYTLEAVYEAVFGKPKEKVYAEEIAQAWESGEGLERVARYSMEDAKVTYELGREFFPMEAQLSRLIGQSLWDVSRSSTGNLVEWFLLRKAYKRNELAPNKPDERELARRRGGYAGGYVKEPERGLWDNIVYLDFRSLYPSIIITHNVSPDTLNREGCKEYDVAPEVGHKFCKDFPGFIPSLLGDLLEERQKIKRKMKATVDPLEKRLLDYRMWLIKILANSFYGYYGYAKARWYCKECAESVTAWGREYIEMVIRELEEKFGFKVLYADTDGLHATIPGADAETVKKKAKEFLKYINPKLPGLLELEYEGFYVRGFFVTKKKYAVIDEEGKITTRGLEIVRRDWSEIAKETQARVLEAILKHGDVEEAVRIVKEVTEKLSKYEVPPEKLVIHEQITRDLRDYKATGPHVAVAKRLAARGVKIRPGTVISYIVLKGSGRIGDRAIPADEFDPTKHRYDAEYYIENQVLPAVERILKAFGYRKEDLRYQKTKQVGSGAWLKVKGKKGTEAYVEQKLISEEDLNSAVDHHHHHH

SEQ ID NO: 207 - DNA, 2409 bp, Artificial Sequence
  Description of Artificial Sequence:Thermococcus species 9degreesN-7 mutant DNA polymerase, 9degreesN mutant
atgattctcgataccgactacatcaccgagaacgggaagcccgtgataagggtcttcaagaaggagaacggcgagtttaaaatcgagtacgacagaaccttcgagccctacttctacgcccttctgaaggacgattctgcgatagaggacgtcaagaaggtaaccgcaaagaggcacggaacggttgtcaaggtgaagcgcgccgagaaggtgcagaagaagttcctcggcaggccgatagaggtctggaagctctacttcaaccatcctcaggacgtcccggcgattcgagacaggatacgcgcccaccccgctgtcgttgacatctacgagtacgacatacccttcgccaagcgctacctcatcgacaagggcctgattccgatggagggcgacgaggagcttacgatgctcgccttcgcgatcgcaaccctctatcacgagggcgaggagttcggaaccgggccgattctcatgataagctacgccgacgggagcgaggcgagggtgataacctggaagaagattgaccttccgtacgttgacgtcgtctcgaccgagaaggagatgattaagcgcttcctccgcgtcgtcagggagaaggaccccgacgtgctcatcacctacaacggcgacaacttcgacttcgcctacctgaagaagcgctgtgaggaactcggaataaagttcacactcggcagggacgggagcgagccgaagatacagcgaatgggcgaccgctttgccgttgaggtgaagggcaggattcacttcgacctctaccccgtcataaggcgcacgataaacctcccgacctacacccttgaggccgtttacgaggccgtctttggaaagcccaaggagaaggtttacgcagaggagatagcgcaggcctgggagagcggggagggccttgaaagggttgcaagatactcgatggaggacgctaaggtgacctacgagctgggaagggagttcttcccgatggaggcccagctttcgaggcttataggccagagcctctgggacgtctcgcgctcgagcaccggaaatttggtggagtggttcctcctgcggaaggcctacaagaggaacgagctcgccccaaacaagcccgacgagagggagctcgcgagacggcgcgggggctacgctggcgggtacgttaaggaaccagagcggggattgtgggacaacattgtgtatttagacttccgctcgctgtatccttcaatcatcataacccacaacgtctcgccggataccctcaaccgcgagggctgtaaagagtacgacgtcgcccctgaggttggacacaagttctgcaaggacttccccggcttcataccaagcctcctgggagatttgctcgaggagaggcagaagataaagcggaagatgaaggcaacggttgacccgctggagaagaaactcctcgattacaggatgtggcttataaaaatcctcgccaacagcatctacggctactacggctacgccaaggcccggtggtactgcaaggagtgcgccgagagcgttacggcctggggaagggagtatatagaaatggttatccgggaactcgaagaaaaattcggttttaaagttctctatgccgatacagacggtctccatgctaccattcccggagcagacgctgaaacagtcaagaaaaaagcaaaggagttcttaaaatacattaatccaaaactgcccggcctgctcgaacttgagtacgagggcttctacgtgaggggcttcttcgtcacgaagaagaagtacgctgtgatagacgaggagggcaagataaccacgaggggtcttgagattgtgaggcgcgactggagcgagatagcgaaggagacccaggccagggtcttagaggcgatactcaagcacggtgacgtcgaggaggccgttaggatagtcaaggaagtgacggaaaagctgagcaagtatgaggtcccgcccgagaagctggtaatccacgagcagataacgcgcgatttgagggattacaaagccaccggcccgcacgttgccgttgcgaagaggctcgcggcgcgtggagtgaaaatccggcccggcacggtgataagctacatcgtcctaaagggctctggaaggataggcgacagggcgattccagctgatgagttcgacccgacgaagcaccgctacgatgcggaatactacatcgagaaccaggttctcccggcggtggagaggattctaaaagccttcggctatcggaaggaggatttgcgctaccagaagacgaagcaggtcggctcgggcgcgtggctgaaggtgaaggggaagaagggtaccgaagcttacgtagaacaaaaactcatctcagaagaggatctgaatagcgccgtcgaccatcatcatcatcatcattga

SEQ ID NO: 208 - protein, 802 aa, Artificial Sequence
  Description of Artificial Sequence:Thermococcus species 9degreesN-7 mutant DNA polymerase, 9degreesN mutant
MILDTDYITENGKPVIRVFKKENGEFKIEYDRTFEPYFYALLKDDSAIEDVKKVTAKRHGTVVKVKRAEKVQKKFLGRPIEVWKLYFNHPQDVPAIRDRIRAHPAVVDIYEYDIPFAKRYLIDKGLIPMEGDEELTMLAFAIATLYHEGEEFGTGPILMISYADGSEARVITWKKIDLPYVDVVSTEKEMIKRFLRVVREKDPDVLITYNGDNFDFAYLKKRCEELGIKFTLGRDGSEPKIQRMGDRFAVEVKGRIHFDLYPVIRRTINLPTYTLEAVYEAVFGKPKEKVYAEEIAQAWESGEGLERVARYSMEDAKVTYELGREFFPMEAQLSRLIGQSLWDVSRSSTGNLVEWFLLRKAYKRNELAPNKPDERELARRRGGYAGGYVKEPERGLWDNIVYLDFRSLYPSIIITHNVSPDTLNREGCKEYDVAPEVGHKFCKDFPGFIPSLLGDLLEERQKIKRKMKATVDPLEKKLLDYRMWLIKILANSIYGYYGYAKARWYCKECAESVTAWGREYIEMVIRELEEKFGFKVLYADTDGLHATIPGADAETVKKKAKEFLKYINPKLPGLLELEYEGFYVRGFFVTKKKYAVIDEEGKITTRGLEIVRRDWSEIAKETQARVLEAILKHGDVEEAVRIVKEVTEKLSKYEVPPEKLVIHEQITRDLRDYKATGPHVAVAKRLAARGVKIRPGTVISYIVLKGSGRIGDRAIPADEFDPTKHRYDAEYYIENQVLPAVERILKAFGYRKEDLRYQKTKQVGSGAWLKVKGKKGTEAYVEQKLISEEDLNSAVDHHHHHH

SEQ ID NO: 209 - DNA, 2409 bp, Artificial Sequence
  Description of Artificial Sequence:Thermococcus species 9degreesN-7 mutant DNA polymerase, 9degreesN mutant
atgattctcgataccgactacatcaccgagaacgggaagcccgtgataagggtcttcaagaaggagaacggcgagtttaaaatcgagtacgacagaaccttcgagccctacttctacgcccttctgaaggacgattctgcgatagaggacgtcaagaaggtaaccgcaaagaggcacggaacggttgtcaaggtgaagcgcgccgagaaggtgcagaagaagttcctcggcaggccgatagaggtctggaagctctacttcaaccatcctcaggacgtcccggcgattcgagacaggatacgcgcccaccccgctgtcgttgacatctacgagtacgacatacccttcgccaagcgctacctcatcgacaagggcctgattccgatggagggcgacgaggagcttacgatgctcgccttcgcgatcgcaaccctctatcacgagggcgaggagttcggaaccgggccgattctcatgataagctacgccgacgggagcgaggcgagggtgataacctggaagaagattgaccttccgtacgttgacgtcgtctcgaccgagaaggagatgattaagcgcttcctccgcgtcgtcagggagaaggaccccgacgtgctcatcacctacaacggcgacaacttcgacttcgcctacctgaagaagcgctgtgaggaactcggaataaagttcacactcggcagggacgggagcgagccgaagatacagcgaatgggcgaccgctttgccgttgaggtgaagggcaggattcacttcgacctctaccccgtcataaggcgcacgataaacctcccgacctacacccttgaggccgtttacgaggccgtctttggaaagcccaaggagaaggtttacgcagaggagatagcgcaggcctgggagagcggggagggccttgaaagggttgcaagatactcgatggaggacgctaaggtgacctacgagctgggaagggagttcttcccgatggaggcccagctttcgaggcttataggccagagcctctgggacgtctcgcgctcgagcaccggaaatatggtggagtggttcctcctgcggaaggcctacaagaggaacgagctcgccccaaacaagcccgacgagagggagctcgcgagacggcgcgggggctacgctggcgggtacgttaaggaaccagagcggggattgtgggacaacattgtgtatttagacttccgctcgctgtatccttcaatcatcataacccacaacgtctcgccggataccctcaaccgcgagggctgtaaagagtacgacgtcgcccctgaggttggacacaagttctgcaaggacttccccggcttcataccaagcctcctgggagatttgctcgaggagaggcagaagataaagcggaagatgaaggcaacggttgacccgctggagaagaaactcctcgattacaggatgtggcttataaaaatcctcgccaacagcttctacggctactacggctacgccaaggcccggtggtactgcaaggagtgcgccgagagcgttacggcctggggaagggagtatatagaaatggttatccgggaactcgaagaaaaattcggttttaaagttctctatgccgatacagacggtctccatgctaccattcccggagcagacgctgaaacagtcaagaaaaaagcaaaggagttcttaaaatacattaatccaaaactgcccggcctgctcgaacttgagtacgagggcttctacgtgaggggcttcttcgtcacgaagaagaagtacgctgtgatagacgaggagggcaagataaccacgaggggtcttgagattgtgaggcgcgactggagcgagatagcgaaggagacccaggccagggtcttagaggcgatactcaagcacggtgacgtcgaggaggccgttaggatagtcaaggaagtgacggaaaagctgagcaagtatgaggtcccgcccgagaagctggtaatccacgagcagataacgcgcgatttgagggattacaaagccaccggcccgcacgttgccgttgcgaagaggctcgcggcgcgtggagtgaaaatccggcccggcacggtgataagctacatcgtcctaaagggctctggaaggataggcgacagggcgattccagctgatgagttcgacccgacgaagcaccgctacgatgcggaatactacatcgagaaccaggttctcccggcggtggagaggattctaaaagccttcggctatcggaaggaggatttgcgctaccagaagacgaagcaggtcggctcgggcgcgtggctgaaggtgaaggggaagaagggtaccgaagcttacgtagaacaaaaactcatctcagaagaggatctgaatagcgccgtcgaccatcatcatcatcatcattga

SEQ ID NO: 210 - protein, 802 aa, Artificial Sequence
  Description of Artificial Sequence:Thermococcus species 9degreesN-7 mutant DNA polymerase, 9degreesN mutant
MILDTDYITENGKPVIRVFKKENGEFKIEYDRTFEPYFYALLKDDSAIEDVKKVTAKRHGTVVKVKRAEKVQKKFLGRPIEVWKLYFNHPQDVPAIRDRIRAHPAVVDIYEYDIPFAKRYLIDKGLIPMEGDEELTMLAFAIATLYHEGEEFGTGPILMISYADGSEARVITWKKIDLPYVDVVSTEKEMIKRFLRVVREKDPDVLITYNGDNFDFAYLKKRCEELGIKFTLGRDGSEPKIQRMGDRFAVEVKGRIHFDLYPVIRRTINLPTYTLEAVYEAVFGKPKEKVYAEEIAQAWESGEGLERVARYSMEDAKVTYELGREFFPMEAQLSRLIGQSLWDVSRSSTGNMVEWFLLRKAYKRNELAPNKPDERELARRRGGYAGGYVKEPERGLWDNIVYLDFRSLYPSIIITHNVSPDTLNREGCKEYDVAPEVGHKFCKDFPGFIPSLLGDLLEERQKIKRKMKATVDPLEKKLLDYRMWLIKILANSFYGYYGYAKARWYCKECAESVTAWGREYIEMVIRELEEKFGFKVLYADTDGLHATIPGADAETVKKKAKEFLKYINPKLPGLLELEYEGFYVRGFFVTKKKYAVIDEEGKITTRGLEIVRRDWSEIAKETQARVLEAILKHGDVEEAVRIVKEVTEKLSKYEVPPEKLVIHEQITRDLRDYKATGPHVAVAKRLAARGVKIRPGTVISYIVLKGSGRIGDRAIPADEFDPTKHRYDAEYYIENQVLPAVERILKAFGYRKEDLRYQKTKQVGSGAWLKVKGKKGTEAYVEQKLISEEDLNSAVDHHHHHH

SEQ ID NO: 211 - DNA, 2409 bp, Artificial Sequence
  Description of Artificial Sequence:Thermococcus species 9degreesN-7 mutant DNA polymerase, 9degreesN mutant
atgattctcgataccgactacatcaccgagaacgggaagcccgtgataagggtcttcaagaaggagaacggcgagtttaaaatcgagtacgacagaaccttcgagccctacttctacgcccttctgaaggacgattctgcgatagaggacgtcaagaaggtaaccgcaaagaggcacggaacggttgtcaaggtgaagcgcgccgagaaggtgcagaagaagttcctcggcaggccgatagaggtctggaagctctacttcaaccatcctcaggacgtcccggcgattcgagacaggatacgcgcccaccccgctgtcgttgacatctacgagtacgacatacccttcgccaagcgctacctcatcgacaagggcctgattccgatggagggcgacgaggagcttacgatgctcgccttcgcgatcgcaaccctctatcacgagggcgaggagttcggaaccgggccgattctcatgataagctacgccgacgggagcgaggcgagggtgataacctggaagaagattgaccttccgtacgttgacgtcgtctcgaccgagaaggagatgattaagcgcttcctccgcgtcgtcagggagaaggaccccgacgtgctcatcacctacaacggcgacaacttcgacttcgcctacctgaagaagcgctgtgaggaactcggaataaagttcacactcggcagggacgggagcgagccgaagatacagcgaatgggcgaccgctttgccgttgaggtgaagggcaggattcacttcgacctctaccccgtcataaggcgcacgataaacctcccgacctacacccttgaggccgtttacgaggccgtctttggaaagcccaaggagaaggtttacgcagaggagatagcgcaggcctgggagagcggggagggccttgaaagggttgcaagatactcgatggaggacgctaaggtgacctacgagctgggaagggagttcttcccgatggaggcccagctttcgaggcttataggccagagcctctgggacgtctcgcgctcgagcaccggaaatttggtggagtggttcctcctgtacaaggcctacaagaggaacgagctcgccccaaacaagcccgacgagagggagctcgcgagacggcgcgggggctacgctggcgggtacgttaaggaaccagagcggggattgtgggacaacattgtgtatttagacttccgctcgctgtatccttcaatcatcataacccacaacgtctcgccggataccctcaaccgcgagggctgtaaagagtacgacgtcgcccctgaggttggacacaagttctgcaaggacttccccggcttcataccaagcctcctgggagatttgctcgaggagaggcagaagataaagcggaagatgaaggcaacggttgacccgctggagaagaaactcctcgattacaggatgtggcttataaaaatcctcgccaacagcttctacggctactacggctacgccaaggcccggtggtactgcaaggagtgcgccgagagcgttacggcctggggaagggagtatatagaaatggttatccgggaactcgaagaaaaattcggttttaaagttctctatgccgatacagacggtctccatgctaccattcccggagcagacgctgaaacagtcaagaaaaaagcaaaggagttcttaaaatacattaatccaaaactgcccggcctgctcgaacttgagtacgagggcttctacgtgaggggcttcttcgtcacgaagaagaagtacgctgtgatagacgaggagggcaagataaccacgaggggtcttgagattgtgaggcgcgactggagcgagatagcgaaggagacccaggccagggtcttagaggcgatactcaagcacggtgacgtcgaggaggccgttaggatagtcaaggaagtgacggaaaagctgagcaagtatgaggtcccgcccgagaagctggtaatccacgagcagataacgcgcgatttgagggattacaaagccaccggcccgcacgttgccgttgcgaagaggctcgcggcgcgtggagtgaaaatccggcccggcacggtgataagctacatcgtcctaaagggctctggaaggataggcgacagggcgattccagctgatgagttcgacccgacgaagcaccgctacgatgcggaatactacatcgagaaccaggttctcccggcggtggagaggattctaaaagccttcggctatcggaaggaggatttgcgctaccagaagacgaagcaggtcggctcgggcgcgtggctgaaggtgaaggggaagaagggtaccgaagcttacgtagaacaaaaactcatctcagaagaggatctgaatagcgccgtcgaccatcatcatcatcatcattga

SEQ ID NO: 212 - protein, 802 aa, Artificial Sequence
  Description of Artificial Sequence:Thermococcus species 9degreesN-7 mutant DNA polymerase, 9degreesN mutant
MILDTDYITENGKPVIRVFKKENGEFKIEYDRTFEPYFYALLKDDSAIEDVKKVTAKRHGTVVKVKRAEKVQKKFLGRPIEVWKLYFNHPQDVPAIRDRIRAHPAVVDIYEYDIPFAKRYLIDKGLIPMEGDEELTMLAFAIATLYHEGEEFGTGPILMISYADGSEARVITWKKIDLPYVDVVSTEKEMIKRFLRVVREKDPDVLITYNGDNFDFAYLKKRCEELGIKFTLGRDGSEPKIQRMGDRFAVEVKGRIHFDLYPVIRRTINLPTYTLEAVYEAVFGKPKEKVYAEEIAQAWESGEGLERVARYSMEDAKVTYELGREFFPMEAQLSRLIGQSLWDVSRSSTGNLVEWFLLYKAYKRNELAPNKPDERELARRRGGYAGGYVKEPERGLWDNIVYLDFRSLYPSIIITHNVSPDTLNREGCKEYDVAPEVGHKFCKDFPGFIPSLLGDLLEERQKIKRKMKATVDPLEKKLLDYRMWLIKILANSFYGYYGYAKARWYCKECAESVTAWGREYIEMVIRELEEKFGFKVLYADTDGLHATIPGADAETVKKKAKEFLKYINPKLPGLLELEYEGFYVRGFFVTKKKYAVIDEEGKITTRGLEIVRRDWSEIAKETQARVLEAILKHGDVEEAVRIVKEVTEKLSKYEVPPEKLVIHEQITRDLRDYKATGPHVAVAKRLAARGVKIRPGTVISYIVLKGSGRIGDRAIPADEFDPTKHRYDAEYYIENQVLPAVERILKAFGYRKEDLRYQKTKQVGSGAWLKVKGKKGTEAYVEQKLISEEDLNSAVDHHHHHH

SEQ ID NO: 213 - DNA, 2409 bp, Artificial Sequence
  Description of Artificial Sequence:Thermococcus species 9degreesN-7 mutant DNA polymerase, 9degreesN mutant
atgattctcgataccgactacatcaccgagaacgggaagcccgtgataagggtcttcaagaaggagaacggcgagtttaaaatcgagtacgacagaaccttcgagccctacttctacgcccttctgaaggacgattctgcgatagaggacgtcaagaaggtaaccgcaaagaggcacggaacggttgtcaaggtgaagcgcgccgagaaggtgcagaagaagttcctcggcaggccgatagaggtctggaagctctacttcaaccatcctcaggacgtcccggcgattcgagacaggatacgcgcccaccccgctgtcgttgacatctacgagtacgacatacccttcgccaagcgctacctcatcgacaagggcctgattccgatggagggcgacgaggagcttacgatgctcgccttcgcgatcgcaaccctctatcacgagggcgaggagttcggaaccgggccgattctcatgataagctacgccgacgggagcgaggcgagggtgataacctggaagaagattgaccttccgtacgttgacgtcgtctcgaccgagaaggagatgattaagcgcttcctccgcgtcgtcagggagaaggaccccgacgtgctcatcacctacaacggcgacaacttcgacttcgcctacctgaagaagcgctgtgaggaactcggaataaagttcacactcggcagggacgggagcgagccgaagatacagcgaatgggcgaccgctttgccgttgaggtgaagggcaggattcacttcgacctctaccccgtcataaggcgcacgataaacctcccgacctacacccttgaggccgtttacgaggccgtctttggaaagcccaaggagaaggtttacgcagaggagatagcgcaggcctgggagagcggggagggccttgaaagggttgcaagatactcgatggaggacgctaaggtgacctacgagctgggaagggagttcttcccgatggaggcccagctttcgaggcttataggccagagcctctgggacgtctcgcgctcgagcaccggaaatttggtggagtggttcctcctgcggaaggcctacaagaggaacgagctcgccccaaacaagcccgacgagagggagctcgcgagacggcgcgggggctacgctggcgggtacgttaaggaaccagagcggggattgtgggacaacattgtgtatttagacttccgctcgctgtatccttcaatcatcataacccacaacgtctcgccggataccctcaaccgcgagggctgtaaagagtacgacgtcgcccctgaggttggacacaagttctgcaaggacttccccggcttcataccaagctacctgggagatttgctcgaggagaggcagaagataaagcggaagatgaaggcaacggttgacccgctggagaagaaactcctcgattacaggatgtggcttataaaaatcctcgccaacagcttctacggctactacggctacgccaaggcccggtggtactgcaaggagtgcgccgagagcgttacggcctggggaagggagtatatagaaatggttatccgggaactcgaagaaaaattcggttttaaagttctctatgccgatacagacggtctccatgctaccattcccggagcagacgctgaaacagtcaagaaaaaagcaaaggagttcttaaaatacattaatccaaaactgcccggcctgctcgaacttgagtacgagggcttctacgtgaggggcttcttcgtcacgaagaagaagtacgctgtgatagacgaggagggcaagataaccacgaggggtcttgagattgtgaggcgcgactggagcgagatagcgaaggagacccaggccagggtcttagaggcgatactcaagcacggtgacgtcgaggaggccgttaggatagtcaaggaagtgacggaaaagctgagcaagtatgaggtcccgcccgagaagctggtaatccacgagcagataacgcgcgatttgagggattacaaagccaccggcccgcacgttgccgttgcgaagaggctcgcggcgcgtggagtgaaaatccggcccggcacggtgataagctacatcgtcctaaagggctctggaaggataggcgacagggcgattccagctgatgagttcgacccgacgaagcaccgctacgatgcggaatactacatcgagaaccaggttctcccggcggtggagaggattctaaaagccttcggctatcggaaggaggatttgcgctaccagaagacgaagcaggtcggctcgggcgcgtggctgaaggtgaaggggaagaagggtaccgaagcttacgtagaacaaaaactcatctcagaagaggatctgaatagcgccgtcgaccatcatcatcatcatcattga

SEQ ID NO: 214 - protein, 802 aa, Artificial Sequence
  Description of Artificial Sequence:Thermococcus species 9degreesN-7 mutant DNA polymerase, 9degreesN mutant
MILDTDYITENGKPVIRVFKKENGEFKIEYDRTFEPYFYALLKDDSAIEDVKKVTAKRHGTVVKVKRAEKVQKKFLGRPIEVWKLYFNHPQDVPAIRDRIRAHPAVVDIYEYDIPFAKRYLIDKGLIPMEGDEELTMLAFAIATLYHEGEEFGTGPILMISYADGSEARVITWKKIDLPYVDVVSTEKEMIKRFLRVVREKDPDVLITYNGDNFDFAYLKKRCEELGIKFTLGRDGSEPKIQRMGDRFAVEVKGRIHFDLYPVIRRTINLPTYTLEAVYEAVFGKPKEKVYAEEIAQAWESGEGLERVARYSMEDAKVTYELGREFFPMEAQLSRLIGQSLWDVSRSSTGNLVEWFLLRKAYKRNELAPNKPDERELARRRGGYAGGYVKEPERGLWDNIVYLDFRSLYPSIIITHNVSPDTLNREGCKEYDVAPEVGHKFCKDFPGFIPSYLGDLLEERQKIKRKMKATVDPLEKKLLDYRMWLIKILANSFYGYYGYAKARWYCKECAESVTAWGREYIEMVIRELEEKFGFKVLYADTDGLHATIPGADAETVKKKAKEFLKYINPKLPGLLELEYEGFYVRGFFVTKKKYAVIDEEGKITTRGLEIVRRDWSEIAKETQARVLEAILKHGDVEEAVRIVKEVTEKLSKYEVPPEKLVIHEQITRDLRDYKATGPHVAVAKRLAARGVKIRPGTVISYIVLKGSGRIGDRAIPADEFDPTKHRYDAEYYIENQVLPAVERILKAFGYRKEDLRYQKTKQVGSGAWLKVKGKKGTEAYVEQKLISEEDLNSAVDHHHHHH

SEQ ID NO: 215 - DNA, 2409 bp, Artificial Sequence
  Description of Artificial Sequence:Thermococcus species 9degreesN-7 mutant DNA polymerase, 9degreesN mutant
atgattctcgataccgactacatcaccgagaacgggaagcccgtgataagggtcttcaagaaggagaacggcgagtttaaaatcgagtacgacagaaccttcgagccctacttctacgcccttctgaaggacgattctgcgatagaggacgtcaagaaggtaaccgcaaagaggcacggaacggttgtcaaggtgaagcgcgccgagaaggtgcagaagaagttcctcggcaggccgatagaggtctggaagctctacttcaaccatcctcaggacgtcccggcgattcgagacaggatacgcgcccaccccgctgtcgttgacatctacgagtacgacatacccttcgccaagcgctacctcatcgacaagggcctgattccgatggagggcgacgaggagcttacgatgctcgccttcgcgatcgcaaccctctatcacgagggcgaggagttcggaaccgggccgattctcatgataagctacgccgacgggagcgaggcgagggtgataacctggaagaagattgaccttccgtacgttgacgtcgtctcgaccgagaaggagatgattaagcgcttcctccgcgtcgtcagggagaaggaccccgacgtgctcatcacctacaacggcgacaacttcgacttcgcctacctgaagaagcgctgtgaggaactcggaataaagttcacactcggcagggacgggagcgagccgaagatacagcgaatgggcgaccgctttgccgttgaggtgaagggcaggattcacttcgacctctaccccgtcataaggcgcacgataaacctcccgacctacacccttgaggccgtttacgaggccgtctttggaaagcccaaggagaaggtttacgcagaggagatagcgcaggcctgggagagcggggagggccttgaaagggttgcaagatactcgatggaggacgctaaggtgacctacgagctgggaagggagttcttccctccagaggcccagctttcgaggcttataggccagagcctctgggacgtctcgcgctcgagcaccggaaatttggtggagtggttcctcctgcggaaggcctacaagaggaacgagctcgccccaaacaagcccgacgagagggagctcgcgagacggcgcgggggctacgctggcgggtacgttaaggaaccagagcggggattgtgggacaacattgtgtatttagacttccgctcgctgtatccttcaatcatcataacccacaacgtctcgccggataccctcaaccgcgagggctgtaaagagtacgacgtcgcccctgaggttggacacaagttctgcaaggacttccccggcttcataccaagcctcctgggagatttgctcgaggagaggcagaagataaagcggaagatgaaggcaacggttgacccgctggagaagaaactcctcgattacaggatgtggcttataaaaatcctcgccaacagcttctacggctactacggctacgccaaggcccggtggtactgcaaggagtgcgccgagagcgttacggcctggggaagggagtatatagaaatggttatccgggaactcgaagaaaaattcggttttaaagttctctatgccgatacagacggtctccatgctaccattcccggagcagacgctgaaacagtcaagaaaaaagcaaaggagttcttaaaatacattaatccaaaactgcccggcctgctcgaacttgagtacgagggcttctacgtgaggggcttcttcgtcacgaagaagaagtacgctgtgatagacgaggagggcaagataaccacgaggggtcttgagattgtgaggcgcgactggagcgagatagcgaaggagacccaggccagggtcttagaggcgatactcaagcacggtgacgtcgaggaggccgttaggatagtcaaggaagtgacggaaaagctgagcaagtatgaggtcccgcccgagaagctggtaatccacgagcagataacgcgcgatttgagggattacaaagccaccggcccgcacgttgccgttgcgaagaggctcgcggcgcgtggagtgaaaatccggcccggcacggtgataagctacatcgtcctaaagggctctggaaggataggcgacagggcgattccagctgatgagttcgacccgacgaagcaccgctacgatgcggaatactacatcgagaaccaggttctcccggcggtggagaggattctaaaagccttcggctatcggaaggaggatttgcgctaccagaagacgaagcaggtcggctcgggcgcgtggctgaaggtgaaggggaagaagggtaccgaagcttacgtagaacaaaaactcatctcagaagaggatctgaatagcgccgtcgaccatcatcatcatcatcattga

SEQ ID NO: 216 - protein, 802 aa, Artificial Sequence
  Description of Artificial Sequence:Thermococcus species 9degreesN-7 mutant DNA polymerase, 9degreesN mutant
MILDTDYITENGKPVIRVFKKENGEFKIEYDRTFEPYFYALLKDDSAIEDVKKVTAKRHGTVVKVKRAEKVQKKFLGRPIEVWKLYFNHPQDVPAIRDRIRAHPAVVDIYEYDIPFAKRYLIDKGLIPMEGDEELTMLAFAIATLYHEGEEFGTGPILMISYADGSEARVITWKKIDLPYVDVVSTEKEMIKRFLRVVREKDPDVLITYNGDNFDFAYLKKRCEELGIKFTLGRDGSEPKIQRMGDRFAVEVKGRIHFDLYPVIRRTINLPTYTLEAVYEAVFGKPKEKVYAEEIAQAWESGEGLERVARYSMEDAKVTYELGREFFPPEAQLSRLIGQSLWDVSRSSTGNLVEWFLLRKAYKRNELAPNKPDERELARRRGGYAGGYVKEPERGLWDNIVYLDFRSLYPSIIITHNVSPDTLNREGCKEYDVAPEVGHKFCKDFPGFIPSLLGDLLEERQKIKRKMKATVDPLEKKLLDYRMWLIKILANSFYGYYGYAKARWYCKECAESVTAWGREYIEMVIRELEEKFGFKVLYADTDGLHATIPGADAETVKKKAKEFLKYINPKLPGLLELEYEGFYVRGFFVTKKKYAVIDEEGKITTRGLEIVRRDWSEIAKETQARVLEAILKHGDVEEAVRIVKEVTEKLSKYEVPPEKLVIHEQITRDLRDYKATGPHVAVAKRLAARGVKIRPGTVISYIVLKGSGRIGDRAIPADEFDPTKHRYDAEYYIENQVLPAVERILKAFGYRKEDLRYQKTKQVGSGAWLKVKGKKGTEAYVEQKLISEEDLNSAVDHHHHHH

SEQ ID NO: 217 - DNA, 2409 bp, Artificial Sequence
  Description of Artificial Sequence:Thermococcus species 9degreesN-7 mutant DNA polymerase, 9degreesN mutant
atgattctcgataccgactacatcaccgagaacgggaagcccgtgataagggtcttcaagaaggagaacggcgagtttaaaatcgagtacgacagaaccttcgagccctacttctacgcccttctgaaggacgattctgcgatagaggacgtcaagaaggtaaccgcaaagaggcacggaacggttgtcaaggtgaagcgcgccgagaaggtgcagaagaagttcctcggcaggccgatagaggtctggaagctctacttcaaccatcctcaggacgtcccggcgattcgagacaggatacgcgcccaccccgctgtcgttgacatctacgagtacgacatacccttcgccaagcgctacctcatcgacaagggcctgattccgatggagggcgacgaggagcttacgatgctcgccttcgcgatcgcaaccctctatcacgagggcgaggagttcggaaccgggccgattctcatgataagctacgccgacgggagcgaggcgagggtgataacctggaagaagattgaccttccgtacgttgacgtcgtctcgaccgagaaggagatgattaagcgcttcctccgcgtcgtcagggagaaggaccccgacgtgctcatcacctacaacggcgacaacttcgacttcgcctacctgaagaagcgctgtgaggaactcggaataaagttcacactcggcagggacgggagcgagccgaagatacagcgaatgggcgaccgctttgccgttgaggtgaagggcaggattcacttcgacctctaccccgtcataaggcgcacgataaacctcccgacctacacccttgaggccgtttacgaggccgtctttggaaagcccaaggagaaggtttacgcagaggagatagcgcaggcctgggagagcggggagggccttgaaagggttgcaagatactcgatggaggacgctaaggtgacctacgagctgggaagggagttcttcccgatggaggcccagctttcgaggcttataggccagagcctctgggacgtctcgcgctcgagcaccggactattggtggagtggttcctcctgcggaaggcctacaagaggaacgagctcgccccaaacaagcccgacgagagggagctcgcgagacggcgcgggggctacgctggcgggtacgttaaggaaccagagcggggattgtgggacaacattgtgtatttagacttccgctcgctgtatccttcaatcatcataacccacaacgtctcgccggataccctcaaccgcgagggctgtaaagagtacgacgtcgcccctgaggttggacacaagttctgcaaggacttccccggcttcataccaagcctcctgggagatttgctcgaggagaggcagaagataaagcggaagatgaaggcaacggttgacccgctggagaagaaactcctcgattacaggatgtggcttataaaaatcctcgccaacagcttctacggctactacggctacgccaaggcccggtggtactgcaaggagtgcgccgagagcgttacggcctggggaagggagtatatagaaatggttatccgggaactcgaagaaaaattcggttttaaagttctctatgccgatacagacggtctccatgctaccattcccggagcagacgctgaaacagtcaagaaaaaagcaaaggagttcttaaaatacattaatccaaaactgcccggcctgctcgaacttgagtacgagggcttctacgtgaggggcttcttcgtcacgaagaagaagtacgctgtgatagacgaggagggcaagataaccacgaggggtcttgagattgtgaggcgcgactggagcgagatagcgaaggagacccaggccagggtcttagaggcgatactcaagcacggtgacgtcgaggaggccgttaggatagtcaaggaagtgacggaaaagctgagcaagtatgaggtcccgcccgagaagctggtaatccacgagcagataacgcgcgatttgagggattacaaagccaccggcccgcacgttgccgttgcgaagaggctcgcggcgcgtggagtgaaaatccggcccggcacggtgataagctacatcgtcctaaagggctctggaaggataggcgacagggcgattccagctgatgagttcgacccgacgaagcaccgctacgatgcggaatactacatcgagaaccaggttctcccggcggtggagaggattctaaaagccttcggctatcggaaggaggatttgcgctaccagaagacgaagcaggtcggctcgggcgcgtggctgaaggtgaaggggaagaagggtaccgaagcttacgtagaacaaaaactcatctcagaagaggatctgaatagcgccgtcgaccatcatcatcatcatcattga

SEQ ID NO: 218 - protein, 802 aa, Artificial Sequence
  Description of Artificial Sequence:Thermococcus species 9degreesN-7 mutant DNA polymerase, 9degreesN mutant
MILDTDYITENGKPVIRVFKKENGEFKIEYDRTFEPYFYALLKDDSAIEDVKKVTAKRHGTVVKVKRAEKVQKKFLGRPIEVWKLYFNHPQDVPAIRDRIRAHPAVVDIYEYDIPFAKRYLIDKGLIPMEGDEELTMLAFAIATLYHEGEEFGTGPILMISYADGSEARVITWKKIDLPYVDVVSTEKEMIKRFLRVVREKDPDVLITYNGDNFDFAYLKKRCEELGIKFTLGRDGSEPKIQRMGDRFAVEVKGRIHFDLYPVIRRTINLPTYTLEAVYEAVFGKPKEKVYAEEIAQAWESGEGLERVARYSMEDAKVTYELGREFFPMEAQLSRLIGQSLWDVSRSSTGLLVEWFLLRKAYKRNELAPNKPDERELARRRGGYAGGYVKEPERGLWDNIVYLDFRSLYPSIIITHNVSPDTLNREGCKEYDVAPEVGHKFCKDFPGFIPSLLGDLLEERQKIKRKMKATVDPLEKKLLDYRMWLIKILANSFYGYYGYAKARWYCKECAESVTAWGREYIEMVIRELEEKFGFKVLYADTDGLHATIPGADAETVKKKAKEFLKYINPKLPGLLELEYEGFYVRGFFVTKKKYAVIDEEGKITTRGLEIVRRDWSEIAKETQARVLEAILKHGDVEEAVRIVKEVTEKLSKYEVPPEKLVIHEQITRDLRDYKATGPHVAVAKRLAARGVKIRPGTVISYIVLKGSGRIGDRAIPADEFDPTKHRYDAEYYIENQVLPAVERILKAFGYRKEDLRYQKTKQVGSGAWLKVKGKKGTEAYVEQKLISEEDLNSAVDHHHHHH

SEQ ID NO: 219 - DNA, 2409 bp, Artificial Sequence
  Description of Artificial Sequence:Thermococcus species 9degreesN-7 mutant DNA polymerase, 9degreesN mutant
atgattctcgataccgactacatcaccgagaacgggaagcccgtgataagggtcttcaagaaggagaacggcgagtttaaaatcgagtacgacagaaccttcgagccctacttctacgcccttctgaaggacgattctgcgatagaggacgtcaagaaggtaaccgcaaagaggcacggaacggttgtcaaggtgaagcgcgccgagaaggtgcagaagaagttcctcggcaggccgatagaggtctggaagctctacttcaaccatcctcaggacgtcccggcgattcgagacaggatacgcgcccaccccgctgtcgttgacatctacgagtacgacatacccttcgccaagcgctacctcatcgacaagggcctgattccgatggagggcgacgaggagcttacgatgctcgccttcgcgatcgcaaccctctatcacgagggcgaggagttcggaaccgggccgattctcatgataagctacgccgacgggagcgaggcgagggtgataacctggaagaagattgaccttccgtacgttgacgtcgtctcgaccgagaaggagatgattaagcgcttcctccgcgtcgtcagggagaaggaccccgacgtgctcatcacctacaacggcgacaacttcgacttcgcctacctgaagaagcgctgtgaggaactcggaataaagttcacactcggcagggacgggagcgagccgaagatacagcgaatgggcgaccgctttgccgttgaggtgaagggcaggattcacttcgacctctaccccgtcataaggcgcacgataaacctcccgacctacacccttgaggccgtttacgaggccgtctttggaaagcccaaggagaaggtttacgcagaggagatagcgcaggcctgggagagcggggagggccttgaaagggttgcaagatactcgatggaggacgctaaggtgacctacgagctgggaagggagttcttcccgatggaggcccagctttcgaggcttataggccagagcctctgggacgtctcgcgctcgagcaccggaaatttggtggagtggttccaactgcggaaggcctacaagaggaacgagctcgccccaaacaagcccgacgagagggagctcgcgagacggcgcgggggctacgctggcgggtacgttaaggaaccagagcggggattgtgggacaacattgtgtatttagacttccgctcgctgtatccttcaatcatcataacccacaacgtctcgccggataccctcaaccgcgagggctgtaaagagtacgacgtcgcccctgaggttggacacaagttctgcaaggacttccccggcttcataccaagcctcctgggagatttgctcgaggagaggcagaagataaagcggaagatgaaggcaacggttgacccgctggagaagaaactcctcgattacaggatgtggcttataaaaatcctcgccaacagcttctacggctactacggctacgccaaggcccggtggtactgcaaggagtgcgccgagagcgttacggcctggggaagggagtatatagaaatggttatccgggaactcgaagaaaaattcggttttaaagttctctatgccgatacagacggtctccatgctaccattcccggagcagacgctgaaacagtcaagaaaaaagcaaaggagttcttaaaatacattaatccaaaactgcccggcctgctcgaacttgagtacgagggcttctacgtgaggggcttcttcgtcacgaagaagaagtacgctgtgatagacgaggagggcaagataaccacgaggggtcttgagattgtgaggcgcgactggagcgagatagcgaaggagacccaggccagggtcttagaggcgatactcaagcacggtgacgtcgaggaggccgttaggatagtcaaggaagtgacggaaaagctgagcaagtatgaggtcccgcccgagaagctggtaatccacgagcagataacgcgcgatttgagggattacaaagccaccggcccgcacgttgccgttgcgaagaggctcgcggcgcgtggagtgaaaatccggcccggcacggtgataagctacatcgtcctaaagggctctggaaggataggcgacagggcgattccagctgatgagttcgacccgacgaagcaccgctacgatgcggaatactacatcgagaaccaggttctcccggcggtggagaggattctaaaagccttcggctatcggaaggaggatttgcgctaccagaagacgaagcaggtcggctcgggcgcgtggctgaaggtgaaggggaagaagggtaccgaagcttacgtagaacaaaaactcatctcagaagaggatctgaatagcgccgtcgaccatcatcatcatcatcattga

SEQ ID NO: 220 - protein, 802 aa, Artificial Sequence
  Description of Artificial Sequence:Thermococcus species 9degreesN-7 mutant DNA polymerase, 9degreesN mutant
MILDTDYITENGKPVIRVFKKENGEFKIEYDRTFEPYFYALLKDDSAIEDVKKVTAKRHGTVVKVKRAEKVQKKFLGRPIEVWKLYFNHPQDVPAIRDRIRAHPAVVDIYEYDIPFAKRYLIDKGLIPMEGDEELTMLAFAIATLYHEGEEFGTGPILMISYADGSEARVITWKKIDLPYVDVVSTEKEMIKRFLRVVREKDPDVLITYNGDNFDFAYLKKRCEELGIKFTLGRDGSEPKIQRMGDRFAVEVKGRIHFDLYPVIRRTINLPTYTLEAVYEAVFGKPKEKVYAEEIAQAWESGEGLERVARYSMEDAKVTYELGREFFPMEAQLSRLIGQSLWDVSRSSTGNLVEWFQLRKAYKRNELAPNKPDERELARRRGGYAGGYVKEPERGLWDNIVYLDFRSLYPSIIITHNVSPDTLNREGCKEYDVAPEVGHKFCKDFPGFIPSLLGDLLEERQKIKRKMKATVDPLEKKLLDYRMWLIKILANSFYGYYGYAKARWYCKECAESVTAWGREYIEMVIRELEEKFGFKVLYADTDGLHATIPGADAETVKKKAKEFLKYINPKLPGLLELEYEGFYVRGFFVTKKKYAVIDEEGKITTRGLEIVRRDWSEIAKETQARVLEAILKHGDVEEAVRIVKEVTEKLSKYEVPPEKLVIHEQITRDLRDYKATGPHVAVAKRLAARGVKIRPGTVISYIVLKGSGRIGDRAIPADEFDPTKHRYDAEYYIENQVLPAVERILKAFGYRKEDLRYQKTKQVGSGAWLKVKGKKGTEAYVEQKLISEEDLNSAVDHHHHHH

SEQ ID NO: 221 - DNA, 2409 bp, Artificial Sequence
  Description of Artificial Sequence:Thermococcus species 9degreesN-7 mutant DNA polymerase, 9degreesN mutant
atgattctcgataccgactacatcaccgagaacgggaagcccgtgataagggtcttcaagaaggagaacggcgagtttaaaatcgagtacgacagaaccttcgagccctacttctacgcccttctgaaggacgattctgcgatagaggacgtcaagaaggtaaccgcaaagaggcacggaacggttgtcaaggtgaagcgcgccgagaaggtgcagaagaagttcctcggcaggccgatagaggtctggaagctctacttcaaccatcctcaggacgtcccggcgattcgagacaggatacgcgcccaccccgctgtcgttgacatctacgagtacgacatacccttcgccaagcgctacctcatcgacaagggcctgattccgatggagggcgacgaggagcttacgatgctcgccttcgcgatcgcaaccctctatcacgagggcgaggagttcggaaccgggccgattctcatgataagctacgccgacgggagcgaggcgagggtgataacctggaagaagattgaccttccgtacgttgacgtcgtctcgaccgagaaggagatgattaagcgcttcctccgcgtcgtcagggagaaggaccccgacgtgctcatcacctacaacggcgacaacttcgacttcgcctacctgaagaagcgctgtgaggaactcggaataaagttcacactcggcagggacgggagcgagccgaagatacagcgaatgggcgaccgctttgccgttgaggtgaagggcaggattcacttcgacctctaccccgtcataaggcgcacgataaacctcccgacctacacccttgaggccgtttacgaggccgtctttggaaagcccaaggagaaggtttacgcagaggagatagcgcaggcctgggagagcggggagggccttgaaagggttgcaagatactcgatggaggacgctaaggtgacctacgagctgggaagggagttcttcccgatggaggcccagctttcgaggcttataggccagagcctctgggacgtctcgcgctcgagcaccggaaatttggtggagtggttctggctgcggaaggcctacaagaggaacgagctcgccccaaacaagcccgacgagagggagctcgcgagacggcgcgggggctacgctggcgggtacgttaaggaaccagagcggggattgtgggacaacattgtgtatttagacttccgctcgctgtatccttcaatcatcataacccacaacgtctcgccggataccctcaaccgcgagggctgtaaagagtacgacgtcgcccctgaggttggacacaagttctgcaaggacttccccggcttcataccaagcctcctgggagatttgctcgaggagaggcagaagataaagcggaagatgaaggcaacggttgacccgctggagaagaaactcctcgattacaggatgtggcttataaaaatcctcgccaacagcttctacggctactacggctacgccaaggcccggtggtactgcaaggagtgcgccgagagcgttacggcctggggaagggagtatatagaaatggttatccgggaactcgaagaaaaattcggttttaaagttctctatgccgatacagacggtctccatgctaccattcccggagcagacgctgaaacagtcaagaaaaaagcaaaggagttcttaaaatacattaatccaaaactgcccggcctgctcgaacttgagtacgagggcttctacgtgaggggcttcttcgtcacgaagaagaagtacgctgtgatagacgaggagggcaagataaccacgaggggtcttgagattgtgaggcgcgactggagcgagatagcgaaggagacccaggccagggtcttagaggcgatactcaagcacggtgacgtcgaggaggccgttaggatagtcaaggaagtgacggaaaagctgagcaagtatgaggtcccgcccgagaagctggtaatccacgagcagataacgcgcgatttgagggattacaaagccaccggcccgcacgttgccgttgcgaagaggctcgcggcgcgtggagtgaaaatccggcccggcacggtgataagctacatcgtcctaaagggctctggaaggataggcgacagggcgattccagctgatgagttcgacccgacgaagcaccgctacgatgcggaatactacatcgagaaccaggttctcccggcggtggagaggattctaaaagccttcggctatcggaaggaggatttgcgctaccagaagacgaagcaggtcggctcgggcgcgtggctgaaggtgaaggggaagaagggtaccgaagcttacgtagaacaaaaactcatctcagaagaggatctgaatagcgccgtcgaccatcatcatcatcatcattga

SEQ ID NO: 222 - protein, 802 aa, Artificial Sequence
  Description of Artificial Sequence:Thermococcus species 9degreesN-7 mutant DNA polymerase, 9degreesN mutant
MILDTDYITENGKPVIRVFKKENGEFKIEYDRTFEPYFYALLKDDSAIEDVKKVTAKRHGTVVKVKRAEKVQKKFLGRPIEVWKLYFNHPQDVPAIRDRIRAHPAVVDIYEYDIPFAKRYLIDKGLIPMEGDEELTMLAFAIATLYHEGEEFGTGPILMISYADGSEARVITWKKIDLPYVDVVSTEKEMIKRFLRVVREKDPDVLITYNGDNFDFAYLKKRCEELGIKFTLGRDGSEPKIQRMGDRFAVEVKGRIHFDLYPVIRRTINLPTYTLEAVYEAVFGKPKEKVYAEEIAQAWESGEGLERVARYSMEDAKVTYELGREFFPMEAQLSRLIGQSLWDVSRSSTGNLVEWFWLRKAYKRNELAPNKPDERELARRRGGYAGGYVKEPERGLWDNIVYLDFRSLYPSIIITHNVSPDTLNREGCKEYDVAPEVGHKFCKDFPGFIPSLLGDLLEERQKIKRKMKATVDPLEKKLLDYRMWLIKILANSFYGYYGYAKARWYCKECAESVTAWGREYIEMVIRELEEKFGFKVLYADTDGLHATIPGADAETVKKKAKEFLKYINPKLPGLLELEYEGFYVRGFFVTKKKYAVIDEEGKITTRGLEIVRRDWSEIAKETQARVLEAILKHGDVEEAVRIVKEVTEKLSKYEVPPEKLVIHEQITRDLRDYKATGPHVAVAKRLAARGVKIRPGTVISYIVLKGSGRIGDRAIPADEFDPTKHRYDAEYYIENQVLPAVERILKAFGYRKEDLRYQKTKQVGSGAWLKVKGKKGTEAYVEQKLISEEDLNSAVDHHHHHH

SEQ ID NO: 223 - DNA, 2409 bp, Artificial Sequence
  Description of Artificial Sequence:Thermococcus species 9degreesN-7 mutant DNA polymerase, 9degreesN mutant
atgattctcgataccgactacatcaccgagaacgggaagcccgtgataagggtcttcaagaaggagaacggcgagtttaaaatcgagtacgacagaaccttcgagccctacttctacgcccttctgaaggacgattctgcgatagaggacgtcaagaaggtaaccgcaaagaggcacggaacggttgtcaaggtgaagcgcgccgagaaggtgcagaagaagttcctcggcaggccgatagaggtctggaagctctacttcaaccatcctcaggacgtcccggcgattcgagacaggatacgcgcccaccccgctgtcgttgacatctacgagtacgacatacccttcgccaagcgctacctcatcgacaagggcctgattccgatggagggcgacgaggagcttacgatgctcgccttcgcgatcgcaaccctctatcacgagggcgaggagttcggaaccgggccgattctcatgataagctacgccgacgggagcgaggcgagggtgataacctggaagaagattgaccttccgtacgttgacgtcgtctcgaccgagaaggagatgattaagcgcttcctccgcgtcgtcagggagaaggaccccgacgtgctcatcacctacaacggcgacaacttcgacttcgcctacctgaagaagcgctgtgaggaactcggaataaagttcacactcggcagggacgggagcgagccgaagatacagcgaatgggcgaccgctttgccgttgaggtgaagggcaggattcacttcgacctctaccccgtcataaggcgcacgataaacctcccgacctacacccttgaggccgtttacgaggccgtctttggaaagcccaaggagaaggtttacgcagaggagatagcgcaggcctgggagagcggggagggccttgaaagggttgcaagatactcgatggaggacgctaaggtgacctacgagctgggaagggagttcttcccgatggaggcccagctttcgaggcttataggccagagcctctgggacgtctcgcgctcgagcaccggaaatttggtggagtggttcgagctgcggaaggcctacaagaggaacgagctcgccccaaacaagcccgacgagagggagctcgcgagacggcgcgggggctacgctggcgggtacgttaaggaaccagagcggggattgtgggacaacattgtgtatttagacttccgctcgctgtatccttcaatcatcataacccacaacgtctcgccggataccctcaaccgcgagggctgtaaagagtacgacgtcgcccctgaggttggacacaagttctgcaaggacttccccggcttcataccaagcctcctgggagatttgctcgaggagaggcagaagataaagcggaagatgaaggcaacggttgacccgctggagaagaaactcctcgattacaggatgtggcttataaaaatcctcgccaacagcttctacggctactacggctacgccaaggcccggtggtactgcaaggagtgcgccgagagcgttacggcctggggaagggagtatatagaaatggttatccgggaactcgaagaaaaattcggttttaaagttctctatgccgatacagacggtctccatgctaccattcccggagcagacgctgaaacagtcaagaaaaaagcaaaggagttcttaaaatacattaatccaaaactgcccggcctgctcgaacttgagtacgagggcttctacgtgaggggcttcttcgtcacgaagaagaagtacgctgtgatagacgaggagggcaagataaccacgaggggtcttgagattgtgaggcgcgactggagcgagatagcgaaggagacccaggccagggtcttagaggcgatactcaagcacggtgacgtcgaggaggccgttaggatagtcaaggaagtgacggaaaagctgagcaagtatgaggtcccgcccgagaagctggtaatccacgagcagataacgcgcgatttgagggattacaaagccaccggcccgcacgttgccgttgcgaagaggctcgcggcgcgtggagtgaaaatccggcccggcacggtgataagctacatcgtcctaaagggctctggaaggataggcgacagggcgattccagctgatgagttcgacccgacgaagcaccgctacgatgcggaatactacatcgagaaccaggttctcccggcggtggagaggattctaaaagccttcggctatcggaaggaggatttgcgctaccagaagacgaagcaggtcggctcgggcgcgtggctgaaggtgaaggggaagaagggtaccgaagcttacgtagaacaaaaactcatctcagaagaggatctgaatagcgccgtcgaccatcatcatcatcatcattga

SEQ ID NO: 224 - protein, 802 aa, Artificial Sequence
  Description of Artificial Sequence:Thermococcus species 9degreesN-7 mutant DNA polymerase, 9degreesN mutant
MILDTDYITENGKPVIRVFKKENGEFKIEYDRTFEPYFYALLKDDSAIEDVKKVTAKRHGTVVKVKRAEKVQKKFLGRPIEVWKLYFNHPQDVPAIRDRIRAHPAVVDIYEYDIPFAKRYLIDKGLIPMEGDEELTMLAFAIATLYHEGEEFGTGPILMISYADGSEARVITWKKIDLPYVDVVSTEKEMIKRFLRVVREKDPDVLITYNGDNFDFAYLKKRCEELGIKFTLGRDGSEPKIQRMGDRFAVEVKGRIHFDLYPVIRRTINLPTYTLEAVYEAVFGKPKEKVYAEEIAQAWESGEGLERVARYSMEDAKVTYELGREFFPMEAQLSRLIGQSLWDVSRSSTGNLVEWFELRKAYKRNELAPNKPDERELARRRGGYAGGYVKEPERGLWDNIVYLDFRSLYPSIIITHNVSPDTLNREGCKEYDVAPEVGHKFCKDFPGFIPSLLGDLLEERQKIKRKMKATVDPLEKKLLDYRMWLIKILANSFYGYYGYAKARWYCKECAESVTAWGREYIEMVIRELEEKFGFKVLYADTDGLHATIPGADAETVKKKAKEFLKYINPKLPGLLELEYEGFYVRGFFVTKKKYAVIDEEGKITTRGLEIVRRDWSEIAKETQARVLEAILKHGDVEEAVRIVKEVTEKLSKYEVPPEKLVIHEQITRDLRDYKATGPHVAVAKRLAARGVKIRPGTVISYIVLKGSGRIGDRAIPADEFDPTKHRYDAEYYIENQVLPAVERILKAFGYRKEDLRYQKTKQVGSGAWLKVKGKKGTEAYVEQKLISEEDLNSAVDHHHHHH

SEQ ID NO: 225 - DNA, 2409 bp, Artificial Sequence
  Description of Artificial Sequence:Thermococcus species 9degreesN-7 mutant DNA polymerase, 9degreesN mutant
atgattctcgataccgactacatcaccgagaacgggaagcccgtgataagggtcttcaagaaggagaacggcgagtttaaaatcgagtacgacagaaccttcgagccctacttctacgcccttctgaaggacgattctgcgatagaggacgtcaagaaggtaaccgcaaagaggcacggaacggttgtcaaggtgaagcgcgccgagaaggtgcagaagaagttcctcggcaggccgatagaggtctggaagctctacttcaaccatcctcaggacgtcccggcgattcgagacaggatacgcgcccaccccgctgtcgttgacatctacgagtacgacatacccttcgccaagcgctacctcatcgacaagggcctgattccgatggagggcgacgaggagcttacgatgctcgccttcgcgatcgcaaccctctatcacgagggcgaggagttcggaaccgggccgattctcatgataagctacgccgacgggagcgaggcgagggtgataacctggaagaagattgaccttccgtacgttgacgtcgtctcgaccgagaaggagatgattaagcgcttcctccgcgtcgtcagggagaaggaccccgacgtgctcatcacctacaacggcgacaacttcgacttcgcctacctgaagaagcgctgtgaggaactcggaataaagttcacactcggcagggacgggagcgagccgaagatacagcgaatgggcgaccgctttgccgttgaggtgaagggcaggattcacttcgacctctaccccgtcataaggcgcacgataaacctcccgacctacacccttgaggccgtttacgaggccgtctttggaaagcccaaggagaaggtttacgcagaggagatagcgcaggcctgggagagcggggagggccttgaaagggttgcaagatactcgatggaggacgctaaggtgacctacgagctgggaagggagttcttcccgatggaggcccagctttcgaggcttataggccagagcctctgggacgtctcgcgctcgagcaccggaaatttggtggagtggttcaagctgcggaaggcctacaagaggaacgagctcgccccaaacaagcccgacgagagggagctcgcgagacggcgcgggggctacgctggcgggtacgttaaggaaccagagcggggattgtgggacaacattgtgtatttagacttccgctcgctgtatccttcaatcatcataacccacaacgtctcgccggataccctcaaccgcgagggctgtaaagagtacgacgtcgcccctgaggttggacacaagttctgcaaggacttccccggcttcataccaagcctcctgggagatttgctcgaggagaggcagaagataaagcggaagatgaaggcaacggttgacccgctggagaagaaactcctcgattacaggatgtggcttataaaaatcctcgccaacagcttctacggctactacggctacgccaaggcccggtggtactgcaaggagtgcgccgagagcgttacggcctggggaagggagtatatagaaatggttatccgggaactcgaagaaaaattcggttttaaagttctctatgccgatacagacggtctccatgctaccattcccggagcagacgctgaaacagtcaagaaaaaagcaaaggagttcttaaaatacattaatccaaaactgcccggcctgctcgaacttgagtacgagggcttctacgtgaggggcttcttcgtcacgaagaagaagtacgctgtgatagacgaggagggcaagataaccacgaggggtcttgagattgtgaggcgcgactggagcgagatagcgaaggagacccaggccagggtcttagaggcgatactcaagcacggtgacgtcgaggaggccgttaggatagtcaaggaagtgacggaaaagctgagcaagtatgaggtcccgcccgagaagctggtaatccacgagcagataacgcgcgatttgagggattacaaagccaccggcccgcacgttgccgttgcgaagaggctcgcggcgcgtggagtgaaaatccggcccggcacggtgataagctacatcgtcctaaagggctctggaaggataggcgacagggcgattccagctgatgagttcgacccgacgaagcaccgctacgatgcggaatactacatcgagaaccaggttctcccggcggtggagaggattctaaaagccttcggctatcggaaggaggatttgcgctaccagaagacgaagcaggtcggctcgggcgcgtggctgaaggtgaaggggaagaagggtaccgaagcttacgtagaacaaaaactcatctcagaagaggatctgaatagcgccgtcgaccatcatcatcatcatcattga

SEQ ID NO: 226 - protein, 802 aa, Artificial Sequence
  Description of Artificial Sequence:Thermococcus species 9degreesN-7 mutant DNA polymerase, 9degreesN mutant
MILDTDYITENGKPVIRVFKKENGEFKIEYDRTFEPYFYALLKDDSAIEDVKKVTAKRHGTVVKVKRAEKVQKKFLGRPIEVWKLYFNHPQDVPAIRDRIRAHPAVVDIYEYDIPFAKRYLIDKGLIPMEGDEELTMLAFAIATLYHEGEEFGTGPILMISYADGSEARVITWKKIDLPYVDVVSTEKEMIKRFLRVVREKDPDVLITYNGDNFDFAYLKKRCEELGIKFTLGRDGSEPKIQRMGDRFAVEVKGRIHFDLYPVIRRTINLPTYTLEAVYEAVFGKPKEKVYAEEIAQAWESGEGLERVARYSMEDAKVTYELGREFFPMEAQLSRLIGQSLWDVSRSSTGNLVEWFKLRKAYKRNELAPNKPDERELARRRGGYAGGYVKEPERGLWDNIVYLDFRSLYPSIIITHNVSPDTLNREGCKEYDVAPEVGHKFCKDFPGFIPSLLGDLLEERQKIKRKMKATVDPLEKKLLDYRMWLIKILANSFYGYYGYAKARWYCKECAESVTAWGREYIEMVIRELEEKFGFKVLYADTDGLHATIPGADAETVKKKAKEFLKYINPKLPGLLELEYEGFYVRGFFVTKKKYAVIDEEGKITTRGLEIVRRDWSEIAKETQARVLEAILKHGDVEEAVRIVKEVTEKLSKYEVPPEKLVIHEQITRDLRDYKATGPHVAVAKRLAARGVKIRPGTVISYIVLKGSGRIGDRAIPADEFDPTKHRYDAEYYIENQVLPAVERILKAFGYRKEDLRYQKTKQVGSGAWLKVKGKKGTEAYVEQKLISEEDLNSAVDHHHHHH

SEQ ID NO: 227 - DNA, 2409 bp, Artificial Sequence
  Description of Artificial Sequence:Thermococcus species 9degreesN-7 mutant DNA polymerase, 9degreesN mutant
atgattctcgataccgactacatcaccgagaacgggaagcccgtgataagggtcttcaagaaggagaacggcgagtttaaaatcgagtacgacagaaccttcgagccctacttctacgcccttctgaaggacgattctgcgatagaggacgtcaagaaggtaaccgcaaagaggcacggaacggttgtcaaggtgaagcgcgccgagaaggtgcagaagaagttcctcggcaggccgatagaggtctggaagctctacttcaaccatcctcaggacgtcccggcgattcgagacaggatacgcgcccaccccgctgtcgttgacatctacgagtacgacatacccttcgccaagcgctacctcatcgacaagggcctgattccgatggagggcgacgaggagcttacgatgctcgccttcgcgatcgcaaccctctatcacgagggcgaggagttcggaaccgggccgattctcatgataagctacgccgacgggagcgaggcgagggtgataacctggaagaagattgaccttccgtacgttgacgtcgtctcgaccgagaaggagatgattaagcgcttcctccgcgtcgtcagggagaaggaccccgacgtgctcatcacctacaacggcgacaacttcgacttcgcctacctgaagaagcgctgtgaggaactcggaataaagttcacactcggcagggacgggagcgagccgaagatacagcgaatgggcgaccgctttgccgttgaggtgaagggcaggattcacttcgacctctaccccgtcataaggcgcacgataaacctcccgacctacacccttgaggccgtttacgaggccgtctttggaaagcccaaggagaaggtttacgcagaggagatagcgcaggcctgggagagcggggagggccttgaaagggttgcaagatactcgatggaggacgctaaggtgacctacgagctgggaagggagttcttcccgatggaggcccagctttcgaggcttataggccagagcctctgggacgtctcgcgctcgagcaccggaaatttggtggagtggttcctcctgcggaaggcctacaagaggaacgagctcgccccaaacaagcccgacgagagggagctcgcgagacggcgcgggggctacgctggcgggtacgttaaggaaccagagcggggattgtgggacaacattgtgtatttagacttccgctcgctgtatccttcaatcatcataacccacaacgtctcgccggataccctcaaccgcgagggctgtaaagagtacgacgtcgcccctgaggttggacacaagttctgcaaggacttccccggcttcataccaagcctcctgggagatttgctcgaggagaggcagaagataaagcggaagatgaaggcaacggttgacccgctggagaagaaactcctcgattacagggtgtggcttataaaaatcctcgccaacagcttctacggctactacggctacgccaaggcccggtggtactgcaaggagtgcgccgagagcgttacggcctggggaagggagtatatagaaatggttatccgggaactcgaagaaaaattcggttttaaagttctctatgccgatacagacggtctccatgctaccattcccggagcagacgctgaaacagtcaagaaaaaagcaaaggagttcttaaaatacattaatccaaaactgcccggcctgctcgaacttgagtacgagggcttctacgtgaggggcttcttcgtcacgaagaagaagtacgctgtgatagacgaggagggcaagataaccacgaggggtcttgagattgtgaggcgcgactggagcgagatagcgaaggagacccaggccagggtcttagaggcgatactcaagcacggtgacgtcgaggaggccgttaggatagtcaaggaagtgacggaaaagctgagcaagtatgaggtcccgcccgagaagctggtaatccacgagcagataacgcgcgatttgagggattacaaagccaccggcccgcacgttgccgttgcgaagaggctcgcggcgcgtggagtgaaaatccggcccggcacggtgataagctacatcgtcctaaagggctctggaaggataggcgacagggcgattccagctgatgagttcgacccgacgaagcaccgctacgatgcggaatactacatcgagaaccaggttctcccggcggtggagaggattctaaaagccttcggctatcggaaggaggatttgcgctaccagaagacgaagcaggtcggctcgggcgcgtggctgaaggtgaaggggaagaagggtaccgaagcttacgtagaacaaaaactcatctcagaagaggatctgaatagcgccgtcgaccatcatcatcatcatcattga

SEQ ID NO: 228 - protein, 802 aa, Artificial Sequence
  Description of Artificial Sequence:Thermococcus species 9degreesN-7 mutant DNA polymerase, 9degreesN mutant
MILDTDYITENGKPVIRVFKKENGEFKIEYDRTFEPYFYALLKDDSAIEDVKKVTAKRHGTVVKVKRAEKVQKKFLGRPIEVWKLYFNHPQDVPAIRDRIRAHPAVVDIYEYDIPFAKRYLIDKGLIPMEGDEELTMLAFAIATLYHEGEEFGTGPILMISYADGSEARVITWKKIDLPYVDVVSTEKEMIKRFLRVVREKDPDVLITYNGDNFDFAYLKKRCEELGIKFTLGRDGSEPKIQRMGDRFAVEVKGRIHFDLYPVIRRTINLPTYTLEAVYEAVFGKPKEKVYAEEIAQAWESGEGLERVARYSMEDAKVTYELGREFFPMEAQLSRLIGQSLWDVSRSSTGNLVEWFLLRKAYKRNELAPNKPDERELARRRGGYAGGYVKEPERGLWDNIVYLDFRSLYPSIIITHNVSPDTLNREGCKEYDVAPEVGHKFCKDFPGFIPSLLGDLLEERQKIKRKMKATVDPLEKKLLDYRVWLIKILANSFYGYYGYAKARWYCKECAESVTAWGREYIEMVIRELEEKFGFKVLYADTDGLHATIPGADAETVKKKAKEFLKYINPKLPGLLELEYEGFYVRGFFVTKKKYAVIDEEGKITTRGLEIVRRDWSEIAKETQARVLEAILKHGDVEEAVRIVKEVTEKLSKYEVPPEKLVIHEQITRDLRDYKATGPHVAVAKRLAARGVKIRPGTVISYIVLKGSGRIGDRAIPADEFDPTKHRYDAEYYIENQVLPAVERILKAFGYRKEDLRYQKTKQVGSGAWLKVKGKKGTEAYVEQKLISEEDLNSAVDHHHHHH

SEQ ID NO: 229 - DNA, 2409 bp, Artificial Sequence
  Description of Artificial Sequence:Thermococcus species 9degreesN-7 mutant DNA polymerase, 9degreesN mutant
atgattctcgataccgactacatcaccgagaacgggaagcccgtgataagggtcttcaagaaggagaacggcgagtttaaaatcgagtacgacagaaccttcgagccctacttctacgcccttctgaaggacgattctgcgatagaggacgtcaagaaggtaaccgcaaagaggcacggaacggttgtcaaggtgaagcgcgccgagaaggtgcagaagaagttcctcggcaggccgatagaggtctggaagctctacttcaaccatcctcaggacgtcccggcgattcgagacaggatacgcgcccaccccgctgtcgttgacatctacgagtacgacatacccttcgccaagcgctacctcatcgacaagggcctgattccgatggagggcgacgaggagcttacgatgctcgccttcgcgatcgcaaccctctatcacgagggcgaggagttcggaaccgggccgattctcatgataagctacgccgacgggagcgaggcgagggtgataacctggaagaagattgaccttccgtacgttgacgtcgtctcgaccgagaaggagatgattaagcgcttcctccgcgtcgtcagggagaaggaccccgacgtgctcatcacctacaacggcgacaacttcgacttcgcctacctgaagaagcgctgtgaggaactcggaataaagttcacactcggcagggacgggagcgagccgaagatacagcgaatgggcgaccgctttgccgttgaggtgaagggcaggattcacttcgacctctaccccgtcataaggcgcacgataaacctcccgacctacacccttgaggccgtttacgaggccgtctttggaaagcccaaggagaaggtttacgcagaggagatagcgcaggcctgggagagcggggagggccttgaaagggttgcaagatactcgatggaggacgctaaggtgacctacgagctgggaagggagttcttcccgatggaggcccagctttcgaggcttataggccagagcctctgggacgtctcgcgctcgagcaccggaaatttggtggagtggttcctcctgcggaaggcctacaagaggaacgagctcgccccaaacaagcccgacgagagggagctcgcgagacggcgcgggggctacgctggcgggtacgttaaggaaccagagcggggattgtgggacaacattgtgtatttagacttccgcgcactgtatccttcaatcatcataacccacaacgtctcgccggataccctcaaccgcgagggctgtaaagagtacgacgtcgcccctgaggttggacacaagttctgcaaggacttccccggcttcataccaagcctcctgggagatttgctcgaggagaggcagaagataaagcggaagatgaaggcaacggttgacccgctggagaagaaactcctcgattacaggatgtggcttataaaaatcctcgccaacagcttctacggctactacggctacgccaaggcccggtggtactgcaaggagtgcgccgagagcgttacggcctggggaagggagtatatagaaatggttatccgggaactcgaagaaaaattcggttttaaagttctctatgccgatacagacggtctccatgctaccattcccggagcagacgctgaaacagtcaagaaaaaagcaaaggagttcttaaaatacattaatccaaaactgcccggcctgctcgaacttgagtacgagggcttctacgtgaggggcttcttcgtcacgaagaagaagtacgctgtgatagacgaggagggcaagataaccacgaggggtcttgagattgtgaggcgcgactggagcgagatagcgaaggagacccaggccagggtcttagaggcgatactcaagcacggtgacgtcgaggaggccgttaggatagtcaaggaagtgacggaaaagctgagcaagtatgaggtcccgcccgagaagctggtaatccacgagcagataacgcgcgatttgagggattacaaagccaccggcccgcacgttgccgttgcgaagaggctcgcggcgcgtggagtgaaaatccggcccggcacggtgataagctacatcgtcctaaagggctctggaaggataggcgacagggcgattccagctgatgagttcgacccgacgaagcaccgctacgatgcggaatactacatcgagaaccaggttctcccggcggtggagaggattctaaaagccttcggctatcggaaggaggatttgcgctaccagaagacgaagcaggtcggctcgggcgcgtggctgaaggtgaaggggaagaagggtaccgaagcttacgtagaacaaaaactcatctcagaagaggatctgaatagcgccgtcgaccatcatcatcatcatcattga

SEQ ID NO: 230 - protein, 802 aa, Artificial Sequence
  Description of Artificial Sequence:Thermococcus species 9degreesN-7 mutant DNA polymerase, 9degreesN mutant
MILDTDYITENGKPVIRVFKKENGEFKIEYDRTFEPYFYALLKDDSAIEDVKKVTAKRHGTVVKVKRAEKVQKKFLGRPIEVWKLYFNHPQDVPAIRDRIRAHPAVVDIYEYDIPFAKRYLIDKGLIPMEGDEELTMLAFAIATLYHEGEEFGTGPILMISYADGSEARVITWKKIDLPYVDVVSTEKEMIKRFLRVVREKDPDVLITYNGDNFDFAYLKKRCEELGIKFTLGRDGSEPKIQRMGDRFAVEVKGRIHFDLYPVIRRTINLPTYTLEAVYEAVFGKPKEKVYAEEIAQAWESGEGLERVARYSMEDAKVTYELGREFFPMEAQLSRLIGQSLWDVSRSSTGNLVEWFLLRKAYKRNELAPNKPDERELARRRGGYAGGYVKEPERGLWDNIVYLDFRALYPSIIITHNVSPDTLNREGCKEYDVAPEVGHKFCKDFPGFIPSLLGDLLEERQKIKRKMKATVDPLEKKLLDYRMWLIKILANSFYGYYGYAKARWYCKECAESVTAWGREYIEMVIRELEEKFGFKVLYADTDGLHATIPGADAETVKKKAKEFLKYINPKLPGLLELEYEGFYVRGFFVTKKKYAVIDEEGKITTRGLEIVRRDWSEIAKETQARVLEAILKHGDVEEAVRIVKEVTEKLSKYEVPPEKLVIHEQITRDLRDYKATGPHVAVAKRLAARGVKIRPGTVISYIVLKGSGRIGDRAIPADEFDPTKHRYDAEYYIENQVLPAVERILKAFGYRKEDLRYQKTKQVGSGAWLKVKGKKGTEAYVEQKLISEEDLNSAVDHHHHHH

SEQ ID NO: 231 - DNA, 2409 bp, Artificial Sequence
  Description of Artificial Sequence:Thermococcus species 9degreesN-7 mutant DNA polymerase, 9degreesN mutant
atgattctcgataccgactacatcaccgagaacgggaagcccgtgataagggtcttcaagaaggagaacggcgagtttaaaatcgagtacgacagaaccttcgagccctacttctacgcccttctgaaggacgattctgcgatagaggacgtcaagaaggtaaccgcaaagaggcacggaacggttgtcaaggtgaagcgcgccgagaaggtgcagaagaagttcctcggcaggccgatagaggtctggaagctctacttcaaccatcctcaggacgtcccggcgattcgagacaggatacgcgcccaccccgctgtcgttgacatctacgagtacgacatacccttcgccaagcgctacctcatcgacaagggcctgattccgatggagggcgacgaggagcttacgatgctcgccttcgcgatcgcaaccctctatcacgagggcgaggagttcggaaccgggccgattctcatgataagctacgccgacgggagcgaggcgagggtgataacctggaagaagattgaccttccgtacgttgacgtcgtctcgaccgagaaggagatgattaagcgcttcctccgcgtcgtcagggagaaggaccccgacgtgctcatcacctacaacggcgacaacttcgacttcgcctacctgaagaagcgctgtgaggaactcggaataaagttcacactcggcagggacgggagcgagccgaagatacagcgaatgggcgaccgctttgccgttgaggtgaagggcaggattcacttcgacctctaccccgtcataaggcgcacgataaacctcccgacctacacccttgaggccgtttacgaggccgtctttggaaagcccaaggagaaggtttacgcagaggagatagcgcaggcctgggagagcggggagggccttgaaagggttgcaagatactcgatggaggacgctaaggtgacctacgagctgggaagggagttcttcccgatggaggcccagctttcgaggcttataggccagagcctctgggacgtctcgcgctcgagcaccggaaatttggtggagtggttcctcctgcggaaggcctacaagaggaacgagctcgccccaaacaagcccgacgagagggagctcgcgagacggcgcgggggctacgctggcgggtacgttaaggaaccagagcggggattgtgggacaacattgtgtatttagacttccgctcgctgtatccttcaatcatcataacccacaacgtctcgccggataccctcaaccgcgagggctgtaaagagtacgacgtcgcccctgaggttggacacaagttctgcaaggacttccccggcttcataccaagcctcctgggagatttgctcgaggagaggcagaagataaagcggaagatgaaggcaacggttgacccgctggagaagaaactcctcgattacaggatgtggcttataaaaatcctcgccaacggtttctacggctactacggctacgccaaggcccggtggtactgcaaggagtgcgccgagagcgttacggcctggggaagggagtatatagaaatggttatccgggaactcgaagaaaaattcggttttaaagttctctatgccgatacagacggtctccatgctaccattcccggagcagacgctgaaacagtcaagaaaaaagcaaaggagttcttaaaatacattaatccaaaactgcccggcctgctcgaacttgagtacgagggcttctacgtgaggggcttcttcgtcacgaagaagaagtacgctgtgatagacgaggagggcaagataaccacgaggggtcttgagattgtgaggcgcgactggagcgagatagcgaaggagacccaggccagggtcttagaggcgatactcaagcacggtgacgtcgaggaggccgttaggatagtcaaggaagtgacggaaaagctgagcaagtatgaggtcccgcccgagaagctggtaatccacgagcagataacgcgcgatttgagggattacaaagccaccggcccgcacgttgccgttgcgaagaggctcgcggcgcgtggagtgaaaatccggcccggcacggtgataagctacatcgtcctaaagggctctggaaggataggcgacagggcgattccagctgatgagttcgacccgacgaagcaccgctacgatgcggaatactacatcgagaaccaggttctcccggcggtggagaggattctaaaagccttcggctatcggaaggaggatttgcgctaccagaagacgaagcaggtcggctcgggcgcgtggctgaaggtgaaggggaagaagggtaccgaagcttacgtagaacaaaaactcatctcagaagaggatctgaatagcgccgtcgaccatcatcatcatcatcattga

SEQ ID NO: 232 - protein, 802 aa, Artificial Sequence
  Description of Artificial Sequence:Thermococcus species 9degreesN-7 mutant DNA polymerase, 9degreesN mutant
MILDTDYITENGKPVIRVFKKENGEFKIEYDRTFEPYFYALLKDDSAIEDVKKVTAKRHGTVVKVKRAEKVQKKFLGRPIEVWKLYFNHPQDVPAIRDRIRAHPAVVDIYEYDIPFAKRYLIDKGLIPMEGDEELTMLAFAIATLYHEGEEFGTGPILMISYADGSEARVITWKKIDLPYVDVVSTEKEMIKRFLRVVREKDPDVLITYNGDNFDFAYLKKRCEELGIKFTLGRDGSEPKIQRMGDRFAVEVKGRIHFDLYPVIRRTINLPTYTLEAVYEAVFGKPKEKVYAEEIAQAWESGEGLERVARYSMEDAKVTYELGREFFPMEAQLSRLIGQSLWDVSRSSTGNLVEWFLLRKAYKRNELAPNKPDERELARRRGGYAGGYVKEPERGLWDNIVYLDFRSLYPSIIITHNVSPDTLNREGCKEYDVAPEVGHKFCKDFPGFIPSLLGDLLEERQKIKRKMKATVDPLEKKLLDYRMWLIKILANGFYGYYGYAKARWYCKECAESVTAWGREYIEMVIRELEEKFGFKVLYADTDGLHATIPGADAETVKKKAKEFLKYINPKLPGLLELEYEGFYVRGFFVTKKKYAVIDEEGKITTRGLEIVRRDWSEIAKETQARVLEAILKHGDVEEAVRIVKEVTEKLSKYEVPPEKLVIHEQITRDLRDYKATGPHVAVAKRLAARGVKIRPGTVISYIVLKGSGRIGDRAIPADEFDPTKHRYDAEYYIENQVLPAVERILKAFGYRKEDLRYQKTKQVGSGAWLKVKGKKGTEAYVEQKLISEEDLNSAVDHHHHHH

SEQ ID NO: 233 - DNA, 2409 bp, Artificial Sequence
  Description of Artificial Sequence:Thermococcus species 9degreesN-7 mutant DNA polymerase, 9degreesN mutant
atgattctcgataccgactacatcaccgagaacgggaagcccgtgataagggtcttcaagaaggagaacggcgagtttaaaatcgagtacgacagaaccttcgagccctacttctacgcccttctgaaggacgattctgcgatagaggacgtcaagaaggtaaccgcaaagaggcacggaacggttgtcaaggtgaagcgcgccgagaaggtgcagaagaagttcctcggcaggccgatagaggtctggaagctctacttcaaccatcctcaggacgtcccggcgattcgagacaggatacgcgcccaccccgctgtcgttgacatctacgagtacgacatacccttcgccaagcgctacctcatcgacaagggcctgattccgatggagggcgacgaggagcttacgatgctcgccttcgcgatcgcaaccctctatcacgagggcgaggagttcggaaccgggccgattctcatgataagctacgccgacgggagcgaggcgagggtgataacctggaagaagattgaccttccgtacgttgacgtcgtctcgaccgagaaggagatgattaagcgcttcctccgcgtcgtcagggagaaggaccccgacgtgctcatcacctacaacggcgacaacttcgacttcgcctacctgaagaagcgctgtgaggaactcggaataaagttcacactcggcagggacgggagcgagccgaagatacagcgaatgggcgaccgctttgccgttgaggtgaagggcaggattcacttcgacctctaccccgtcataaggcgcacgataaacctcccgacctacacccttgaggccgtttacgaggccgtctttggaaagcccaaggagaaggtttacgcagaggagatagcgcaggcctgggagagcggggagggccttgaaagggttgcaagatactcgatggaggacgctaaggtgacctacgagctgggaagggagttcttcccgatggaggcccagctttcgaggcttataggccagagcctctgggacgtctcgcgctcgagcaccggaaatttggtggagtggttcctcctgcggaaggcctacaagaggaacgagctcgccccaaacaagcccgacgagagggagctcgcgagacggcgcgggggctacgctggcgggtacgttaaggaaccagagcggggattgtgggacaacattgtgtatttagacttccgctcgctgtatccttcaatcatcataacccacaacgtctcgccggataccctcaaccgcgagggctgtaaagagtacgacgtcgcccctgaggttggacacaagttctgcaaggacttccccggcttcataccaagcctcctgggagatttgctcgaggagaggcagaagataaagcggaagatgaaggcaacggttgacccgctggagaagaaactcctcgattacaggatgtggcttataaaaatcctcgccaacagcttctacggcctttacggctacgccaaggcccggtggtactgcaaggagtgcgccgagagcgttacggcctggggaagggagtatatagaaatggttatccgggaactcgaagaaaaattcggttttaaagttctctatgccgatacagacggtctccatgctaccattcccggagcagacgctgaaacagtcaagaaaaaagcaaaggagttcttaaaatacattaatccaaaactgcccggcctgctcgaacttgagtacgagggcttctacgtgaggggcttcttcgtcacgaagaagaagtacgctgtgatagacgaggagggcaagataaccacgaggggtcttgagattgtgaggcgcgactggagcgagatagcgaaggagacccaggccagggtcttagaggcgatactcaagcacggtgacgtcgaggaggccgttaggatagtcaaggaagtgacggaaaagctgagcaagtatgaggtcccgcccgagaagctggtaatccacgagcagataacgcgcgatttgagggattacaaagccaccggcccgcacgttgccgttgcgaagaggctcgcggcgcgtggagtgaaaatccggcccggcacggtgataagctacatcgtcctaaagggctctggaaggataggcgacagggcgattccagctgatgagttcgacccgacgaagcaccgctacgatgcggaatactacatcgagaaccaggttctcccggcggtggagaggattctaaaagccttcggctatcggaaggaggatttgcgctaccagaagacgaagcaggtcggctcgggcgcgtggctgaaggtgaaggggaagaagggtaccgaagcttacgtagaacaaaaactcatctcagaagaggatctgaatagcgccgtcgaccatcatcatcatcatcattga

SEQ ID NO: 234 - protein, 802 aa, Artificial Sequence
  Description of Artificial Sequence:Thermococcus species 9degreesN-7 mutant DNA polymerase, 9degreesN mutant
MILDTDYITENGKPVIRVFKKENGEFKIEYDRTFEPYFYALLKDDSAIEDVKKVTAKRHGTVVKVKRAEKVQKKFLGRPIEVWKLYFNHPQDVPAIRDRIRAHPAVVDIYEYDIPFAKRYLIDKGLIPMEGDEELTMLAFAIATLYHEGEEFGTGPILMISYADGSEARVITWKKIDLPYVDVVSTEKEMIKRFLRVVREKDPDVLITYNGDNFDFAYLKKRCEELGIKFTLGRDGSEPKIQRMGDRFAVEVKGRIHFDLYPVIRRTINLPTYTLEAVYEAVFGKPKEKVYAEEIAQAWESGEGLERVARYSMEDAKVTYELGREFFPMEAQLSRLIGQSLWDVSRSSTGNLVEWFLLRKAYKRNELAPNKPDERELARRRGGYAGGYVKEPERGLWDNIVYLDFRSLYPSIIITHNVSPDTLNREGCKEYDVAPEVGHKFCKDFPGFIPSLLGDLLEERQKIKRKMKATVDPLEKKLLDYRMWLIKILANSFYGLYGYAKARWYCKECAESVTAWGREYIEMVIRELEEKFGFKVLYADTDGLHATIPGADAETVKKKAKEFLKYINPKLPGLLELEYEGFYVRGFFVTKKKYAVIDEEGKITTRGLEIVRRDWSEIAKETQARVLEAILKHGDVEEAVRIVKEVTEKLSKYEVPPEKLVIHEQITRDLRDYKATGPHVAVAKRLAARGVKIRPGTVISYIVLKGSGRIGDRAIPADEFDPTKHRYDAEYYIENQVLPAVERILKAFGYRKEDLRYQKTKQVGSGAWLKVKGKKGTEAYVEQKLISEEDLNSAVDHHHHHH

SEQ ID NO: 235 - DNA, 2409 bp, Artificial Sequence
  Description of Artificial Sequence:Thermococcus species 9degreesN-7 mutant DNA polymerase, 9degreesN mutant
atgattctcgataccgactacatcaccgagaacgggaagcccgtgataagggtcttcaagaaggagaacggcgagtttaaaatcgagtacgacagaaccttcgagccctacttctacgcccttctgaaggacgattctgcgatagaggacgtcaagaaggtaaccgcaaagaggcacggaacggttgtcaaggtgaagcgcgccgagaaggtgcagaagaagttcctcggcaggccgatagaggtctggaagctctacttcaaccatcctcaggacgtcccggcgattcgagacaggatacgcgcccaccccgctgtcgttgacatctacgagtacgacatacccttcgccaagcgctacctcatcgacaagggcctgattccgatggagggcgacgaggagcttacgatgctcgccttcgcgatcgcaaccctctatcacgagggcgaggagttcggaaccgggccgattctcatgataagctacgccgacgggagcgaggcgagggtgataacctggaagaagattgaccttccgtacgttgacgtcgtctcgaccgagaaggagatgattaagcgcttcctccgcgtcgtcagggagaaggaccccgacgtgctcatcacctacaacggcgacaacttcgacttcgcctacctgaagaagcgctgtgaggaactcggaataaagttcacactcggcagggacgggagcgagccgaagatacagcgaatgggcgaccgctttgccgttgaggtgaagggcaggattcacttcgacctctaccccgtcataaggcgcacgataaacctcccgacctacacccttgaggccgtttacgaggccgtctttggaaagcccaaggagaaggtttacgcagaggagatagcgcaggcctgggagagcggggagggccttgaaagggttgcaagatactcgatggaggacgctaaggtgacctacgagctgggaagggagttcttcccgatggaggcccagctttcgaggcttataggccagagcctctgggacgtctcgcgctcgagcaccggaaatttggtggagtggttcctcctgcggaaggcctacaagaggaacgagctcgccccaaacaagcccgacgagagggagctcgcgagacggcgcgggggctacgctggcgggtacgttaaggaaccagagcggggattgtgggacaacattgtgtatttagacttccgctcgctgtatccttcaatcatcataacccacaacgtctcgccggataccctcaaccgcgagggctgtaaagagtacgacgtcgcccctgaggttggacacaagttctgcaaggacttccccggcttcataccaagcctcctgggagatttgctcgaggagaggcagaagataaagcggaagatgaaggcaacggttgacccgctggagaagaaactcctcgattacaggatgtggcttataaaaatcctcgccaacagcttctacggctaccaaggctacgccaaggcccggtggtactgcaaggagtgcgccgagagcgttacggcctggggaagggagtatatagaaatggttatccgggaactcgaagaaaaattcggttttaaagttctctatgccgatacagacggtctccatgctaccattcccggagcagacgctgaaacagtcaagaaaaaagcaaaggagttcttaaaatacattaatccaaaactgcccggcctgctcgaacttgagtacgagggcttctacgtgaggggcttcttcgtcacgaagaagaagtacgctgtgatagacgaggagggcaagataaccacgaggggtcttgagattgtgaggcgcgactggagcgagatagcgaaggagacccaggccagggtcttagaggcgatactcaagcacggtgacgtcgaggaggccgttaggatagtcaaggaagtgacggaaaagctgagcaagtatgaggtcccgcccgagaagctggtaatccacgagcagataacgcgcgatttgagggattacaaagccaccggcccgcacgttgccgttgcgaagaggctcgcggcgcgtggagtgaaaatccggcccggcacggtgataagctacatcgtcctaaagggctctggaaggataggcgacagggcgattccagctgatgagttcgacccgacgaagcaccgctacgatgcggaatactacatcgagaaccaggttctcccggcggtggagaggattctaaaagccttcggctatcggaaggaggatttgcgctaccagaagacgaagcaggtcggctcgggcgcgtggctgaaggtgaaggggaagaagggtaccgaagcttacgtagaacaaaaactcatctcagaagaggatctgaatagcgccgtcgaccatcatcatcatcatcattga

SEQ ID NO: 236 - protein, 802 aa, Artificial Sequence
  Description of Artificial Sequence:Thermococcus species 9degreesN-7 mutant DNA polymerase, 9degreesN mutant
MILDTDYITENGKPVIRVFKKENGEFKIEYDRTFEPYFYALLKDDSAIEDVKKVTAKRHGTVVKVKRAEKVQKKFLGRPIEVWKLYFNHPQDVPAIRDRIRAHPAVVDIYEYDIPFAKRYLIDKGLIPMEGDEELTMLAFAIATLYHEGEEFGTGPILMISYADGSEARVITWKKIDLPYVDVVSTEKEMIKRFLRVVREKDPDVLITYNGDNFDFAYLKKRCEELGIKFTLGRDGSEPKIQRMGDRFAVEVKGRIHFDLYPVIRRTINLPTYTLEAVYEAVFGKPKEKVYAEEIAQAWESGEGLERVARYSMEDAKVTYELGREFFPMEAQLSRLIGQSLWDVSRSSTGNLVEWFLLRKAYKRNELAPNKPDERELARRRGGYAGGYVKEPERGLWDNIVYLDFRSLYPSIIITHNVSPDTLNREGCKEYDVAPEVGHKFCKDFPGFIPSLLGDLLEERQKIKRKMKATVDPLEKKLLDYRMWLIKILANSFYGYQGYAKARWYCKECAESVTAWGREYIEMVIRELEEKFGFKVLYADTDGLHATIPGADAETVKKKAKEFLKYINPKLPGLLELEYEGFYVRGFFVTKKKYAVIDEEGKITTRGLEIVRRDWSEIAKETQARVLEAILKHGDVEEAVRIVKEVTEKLSKYEVPPEKLVIHEQITRDLRDYKATGPHVAVAKRLAARGVKIRPGTVISYIVLKGSGRIGDRAIPADEFDPTKHRYDAEYYIENQVLPAVERILKAFGYRKEDLRYQKTKQVGSGAWLKVKGKKGTEAYVEQKLISEEDLNSAVDHHHHHH

SEQ ID NO: 237 - DNA, 2409 bp, Artificial Sequence
  Description of Artificial Sequence:Thermococcus species 9degreesN-7 mutant DNA polymerase, 9degreesN mutant
atgattctcgataccgactacatcaccgagaacgggaagcccgtgataagggtcttcaagaaggagaacggcgagtttaaaatcgagtacgacagaaccttcgagccctacttctacgcccttctgaaggacgattctgcgatagaggacgtcaagaaggtaaccgcaaagaggcacggaacggttgtcaaggtgaagcgcgccgagaaggtgcagaagaagttcctcggcaggccgatagaggtctggaagctctacttcaaccatcctcaggacgtcccggcgattcgagacaggatacgcgcccaccccgctgtcgttgacatctacgagtacgacatacccttcgccaagcgctacctcatcgacaagggcctgattccgatggagggcgacgaggagcttacgatgctcgccttcgcgatcgcaaccctctatcacgagggcgaggagttcggaaccgggccgattctcatgataagctacgccgacgggagcgaggcgagggtgataacctggaagaagattgaccttccgtacgttgacgtcgtctcgaccgagaaggagatgattaagcgcttcctccgcgtcgtcagggagaaggaccccgacgtgctcatcacctacaacggcgacaacttcgacttcgcctacctgaagaagcgctgtgaggaactcggaataaagttcacactcggcagggacgggagcgagccgaagatacagcgaatgggcgaccgctttgccgttgaggtgaagggcaggattcacttcgacctctaccccgtcataaggcgcacgataaacctcccgacctacacccttgaggccgtttacgaggccgtctttggaaagcccaaggagaaggtttacgcagaggagatagcgcaggcctgggagagcggggagggccttgaaagggttgcaagatactcgatggaggacgctaaggtgacctacgagctgggaagggagttcttcccgatggaggcccagctttcgaggcttataggccagagcctctgggacgtctcgcgctcgagcaccggaaatttggtggagtggttcctcctgcggaaggcctacaagaggaacgagctcgccccaaacaagcccgacgagagggagctcgcgagacggcgcgggggctacgctggcgggtacgttaaggaaccagagcggggattgtgggacaacattgtgtatttagacttccgctcgctgtatccttcaatcatcataacccacaacgtctcgccggataccctcaaccgcgagggctgtaaagagtacgacgtcgcccctgaggttggacacaagttctgcaaggacttccccggcttcataccaagcctcctgggagatttgctcgaggagaggcagaagataaagcggaagatgaaggcaacggttgacccgctggagaagaaactcctcgattacaggatgtggcttataaaaatcctcgccaacagcttctacggctacaccggctacgccaatgcccggtggtactgcaaggagtgcgccgagagcgttacggcctggggaagggagtatatagaaatggttatccgggaactcgaagaaaaattcggttttaaagttctctatgccgatacagacggtctccatgctaccattcccggagcagacgctgaaacagtcaagaaaaaagcaaaggagttcttaaaatacattaatccaaaactgcccggcctgctcgaacttgagtacgagggcttctacgtgaggggcttcttcgtcacgaagaagaagtacgctgtgatagacgaggagggcaagataaccacgaggggtcttgagattgtgaggcgcgactggagcgagatagcgaaggagacccaggccagggtcttagaggcgatactcaagcacggtgacgtcgaggaggccgttaggatagtcaaggaagtgacggaaaagctgagcaagtatgaggtcccgcccgagaagctggtaatccacgagcagataacgcgcgatttgagggattacaaagccaccggcccgcacgttgccgttgcgaagaggctcgcggcgcgtggagtgaaaatccggcccggcacggtgataagctacatcgtcctaaagggctctggaaggataggcgacagggcgattccagctgatgagttcgacccgacgaagcaccgctacgatgcggaatactacatcgagaaccaggttctcccggcggtggagaggattctaaaagccttcggctatcggaaggaggatttgcgctaccagaagacgaagcaggtcggctcgggcgcgtggctgaaggtgaaggggaagaagggtaccgaagcttacgtagaacaaaaactcatctcagaagaggatctgaatagcgccgtcgaccatcatcatcatcatcattga

SEQ ID NO: 238 - protein, 802 aa, Artificial Sequence
  Description of Artificial Sequence:Thermococcus species 9degreesN-7 mutant DNA polymerase, 9degreesN mutant
MILDTDYITENGKPVIRVFKKENGEFKIEYDRTFEPYFYALLKDDSAIEDVKKVTAKRHGTVVKVKRAEKVQKKFLGRPIEVWKLYFNHPQDVPAIRDRIRAHPAVVDIYEYDIPFAKRYLIDKGLIPMEGDEELTMLAFAIATLYHEGEEFGTGPILMISYADGSEARVITWKKIDLPYVDVVSTEKEMIKRFLRVVREKDPDVLITYNGDNFDFAYLKKRCEELGIKFTLGRDGSEPKIQRMGDRFAVEVKGRIHFDLYPVIRRTINLPTYTLEAVYEAVFGKPKEKVYAEEIAQAWESGEGLERVARYSMEDAKVTYELGREFFPMEAQLSRLIGQSLWDVSRSSTGNLVEWFLLRKAYKRNELAPNKPDERELARRRGGYAGGYVKEPERGLWDNIVYLDFRSLYPSIIITHNVSPDTLNREGCKEYDVAPEVGHKFCKDFPGFIPSLLGDLLEERQKIKRKMKATVDPLEKKLLDYRMWLIKILANSFYGYTGYANARWYCKECAESVTAWGREYIEMVIRELEEKFGFKVLYADTDGLHATIPGADAETVKKKAKEFLKYINPKLPGLLELEYEGFYVRGFFVTKKKYAVIDEEGKITTRGLEIVRRDWSEIAKETQARVLEAILKHGDVEEAVRIVKEVTEKLSKYEVPPEKLVIHEQITRDLRDYKATGPHVAVAKRLAARGVKIRPGTVISYIVLKGSGRIGDRAIPADEFDPTKHRYDAEYYIENQVLPAVERILKAFGYRKEDLRYQKTKQVGSGAWLKVKGKKGTEAYVEQKLISEEDLNSAVDHHHHHH

SEQ ID NO: 239 - DNA, 2409 bp, Artificial Sequence
  Description of Artificial Sequence:Thermococcus species 9degreesN-7 mutant DNA polymerase, 9degreesN mutant
atgattctcgataccgactacatcaccgagaacgggaagcccgtgataagggtcttcaagaaggagaacggcgagtttaaaatcgagtacgacagaaccttcgagccctacttctacgcccttctgaaggacgattctgcgatagaggacgtcaagaaggtaaccgcaaagaggcacggaacggttgtcaaggtgaagcgcgccgagaaggtgcagaagaagttcctcggcaggccgatagaggtctggaagctctacttcaaccatcctcaggacgtcccggcgattcgagacaggatacgcgcccaccccgctgtcgttgacatctacgagtacgacatacccttcgccaagcgctacctcatcgacaagggcctgattccgatggagggcgacgaggagcttacgatgctcgccttcgcgatcgcaaccctctatcacgagggcgaggagttcggaaccgggccgattctcatgataagctacgccgacgggagcgaggcgagggtgataacctggaagaagattgaccttccgtacgttgacgtcgtctcgaccgagaaggagatgattaagcgcttcctccgcgtcgtcagggagaaggaccccgacgtgctcatcacctacaacggcgacaacttcgacttcgcctacctgaagaagcgctgtgaggaactcggaataaagttcacactcggcagggacgggagcgagccgaagatacagcgaatgggcgaccgctttgccgttgaggtgaagggcaggattcacttcgacctctaccccgtcataaggcgcacgataaacctcccgacctacacccttgaggccgtttacgaggccgtctttggaaagcccaaggagaaggtttacgcagaggagatagcgcaggcctgggagagcggggagggccttgaaagggttgcaagatactcgatggaggacgctaaggtgacctacgagctgggaagggagttcttcccgatggaggcccagctttcgaggcttataggccagagcctctgggacgtctcgcgctcgagcaccggaaatttggtgatgtggttcctcctgcggaaggcctacaagaggaacgagctcgccccaaacaagcccgacgagagggagctcgcgagacggcgcgggggctacgctggcgggtacgttaaggaaccagagcggggattgtgggacaacattgtgtatttagacttccgctcgctgtatccttcaatcatcataacccacaacgtctcgccggataccctcaaccgcgagggctgtaaagagtacgacgtcgcccctgaggttggacacaagttctgcaaggacttccccggcttcataccaagcctcctgggagatttgctcgaggagaggcagaagataaagcggaagatgaaggcaacggttgacccgctggagaagaaactcctcgtgtacaggcagtggcttataaaaatcctcgccaacagcttctacggctactacggctacgccaaggcccggtggtactgcaaggagtgcgccgagagcgttacggcctggggaagggagtatatagaaatggttatccgggaactcgaagaaaaattcggttttaaagttctctatgccgatacagacggtctccatgctaccattcccggagcagacgctgaaacagtcaagaaaaaagcaaaggagttcttaaaatacattaatccaaaactgcccggcctgctcgaacttgagtacgagggcttctacgtgaggggcttcttcgtcacgaagaagaagtacgctgtgatagacgaggagggcaagataaccacgaggggtcttgagattgtgaggcgcgactggagcgagatagcgaaggagacccaggccagggtcttagaggcgatactcaagcacggtgacgtcgaggaggccgttaggatagtcaaggaagtgacggaaaagctgagcaagtatgaggtcccgcccgagaagctggtaatccacgagcagataacgcgcgatttgagggattacaaagccaccggcccgcacgttgccgttgcgaagaggctcgcggcgcgtggagtgaaaatccggcccggcacggtgataagctacatcgtcctaaagggctctggaaggataggcgacagggcgattccagctgatgagttcgacccgacgaagcaccgctacgatgcggaatactacatcgagaaccaggttctcccggcggtggagaggattctaaaagccttcggctatcggaaggaggatttgcgctaccagaagacgaagcaggtcggctcgggcgcgtggctgaaggtgaaggggaagaagggtaccgaagcttacgtagaacaaaaactcatctcagaagaggatctgaatagcgccgtcgaccatcatcatcatcatcattga

SEQ ID NO: 240 - protein, 802 aa, Artificial Sequence
  Description of Artificial Sequence:Thermococcus species 9degreesN-7 mutant DNA polymerase, 9degreesN mutant
MILDTDYITENGKPVIRVFKKENGEFKIEYDRTFEPYFYALLKDDSAIEDVKKVTAKRHGTVVKVKRAEKVQKKFLGRPIEVWKLYFNHPQDVPAIRDRIRAHPAVVDIYEYDIPFAKRYLIDKGLIPMEGDEELTMLAFAIATLYHEGEEFGTGPILMISYADGSEARVITWKKIDLPYVDVVSTEKEMIKRFLRVVREKDPDVLITYNGDNFDFAYLKKRCEELGIKFTLGRDGSEPKIQRMGDRFAVEVKGRIHFDLYPVIRRTINLPTYTLEAVYEAVFGKPKEKVYAEEIAQAWESGEGLERVARYSMEDAKVTYELGREFFPMEAQLSRLIGQSLWDVSRSSTGNLVMWFLLRKAYKRNELAPNKPDERELARRRGGYAGGYVKEPERGLWDNIVYLDFRSLYPSIIITHNVSPDTLNREGCKEYDVAPEVGHKFCKDFPGFIPSLLGDLLEERQKIKRKMKATVDPLEKKLLVYRQWLIKILANSFYGYYGYAKARWYCKECAESVTAWGREYIEMVIRELEEKFGFKVLYADTDGLHATIPGADAETVKKKAKEFLKYINPKLPGLLELEYEGFYVRGFFVTKKKYAVIDEEGKITTRGLEIVRRDWSEIAKETQARVLEAILKHGDVEEAVRIVKEVTEKLSKYEVPPEKLVIHEQITRDLRDYKATGPHVAVAKRLAARGVKIRPGTVISYIVLKGSGRIGDRAIPADEFDPTKHRYDAEYYIENQVLPAVERILKAFGYRKEDLRYQKTKQVGSGAWLKVKGKKGTEAYVEQKLISEEDLNSAVDHHHHHH

SEQ ID NO: 241 - DNA, 2409 bp, Artificial Sequence
  Description of Artificial Sequence:Thermococcus species 9degreesN-7 mutant DNA polymerase, 9degreesN mutant
atgattctcgataccgactacatcaccgagaacgggaagcccgtgataagggtcttcaagaaggagaacggcgagtttaaaatcgagtacgacagaaccttcgagccctacttctacgcccttctgaaggacgattctgcgatagaggacgtcaagaaggtaaccgcaaagaggcacggaacggttgtcaaggtgaagcgcgccgagaaggtgcagaagaagttcctcggcaggccgatagaggtctggaagctctacttcaaccatcctcaggacgtcccggcgattcgagacaggatacgcgcccaccccgctgtcgttgacatctacgagtacgacatacccttcgccaagcgctacctcatcgacaagggcctgattccgatggagggcgacgaggagcttacgatgctcgccttcgcgatcgcaaccctctatcacgagggcgaggagttcggaaccgggccgattctcatgataagctacgccgacgggagcgaggcgagggtgataacctggaagaagattgaccttccgtacgttgacgtcgtctcgaccgagaaggagatgattaagcgcttcctccgcgtcgtcagggagaaggaccccgacgtgctcatcacctacaacggcgacaacttcgacttcgcctacctgaagaagcgctgtgaggaactcggaataaagttcacactcggcagggacgggagcgagccgaagatacagcgaatgggcgaccgctttgccgttgaggtgaagggcaggattcacttcgacctctaccccgtcataaggcgcacgataaacctcccgacctacacccttgaggccgtttacgaggccgtctttggaaagcccaaggagaaggtttacgcagaggagatagcgcaggcctgggagagcggggagggccttgaaagggttgcaagatactcgatggaggacgctaaggtgacctacgagctgggaagggagttcttcccgatggaggcccagctttcgaggcttataggccagagcctctgggacgtctcgcgctcgagcaccggaaatttggtggagtggtgtctcctgcggaaggcctacaagaggaacgagctcgccccaaacaagcccgacgagagggagctcgcgagacggcgcgggggctacgctggcgggtacgttaaggaaccagagcggggattgtgggacaacattgtgtatttagacttccgctcgctgtatccttcaatcatcataacccacaacgtctcgccggataccctcaaccgcgagggctgtaaagagtacgacgtcgcccctgaggttggacacaagttctgcaaggacttccccggcttcataccaagcctcctgggagatttgctcgaggagaggcagaagataaagcggaagatgaaggcaacggttgacccgctggagaagaaactcctcgtgtacaggcagtggcttataaaaatcctcgccaacagcttctacggctactacggctacgccaaggcccggtggtactgcaaggagtgcgccgagagcgttacggcctggggaagggagtatatagaaatggttatccgggaactcgaagaaaaattcggttttaaagttctctatgccgatacagacggtctccatgctaccattcccggagcagacgctgaaacagtcaagaaaaaagcaaaggagttcttaaaatacattaatccaaaactgcccggcctgctcgaacttgagtacgagggcttctacgtgaggggcttcttcgtcacgaagaagaagtacgctgtgatagacgaggagggcaagataaccacgaggggtcttgagattgtgaggcgcgactggagcgagatagcgaaggagacccaggccagggtcttagaggcgatactcaagcacggtgacgtcgaggaggccgttaggatagtcaaggaagtgacggaaaagctgagcaagtatgaggtcccgcccgagaagctggtaatccacgagcagataacgcgcgatttgagggattacaaagccaccggcccgcacgttgccgttgcgaagaggctcgcggcgcgtggagtgaaaatccggcccggcacggtgataagctacatcgtcctaaagggctctggaaggataggcgacagggcgattccagctgatgagttcgacccgacgaagcaccgctacgatgcggaatactacatcgagaaccaggttctcccggcggtggagaggattctaaaagccttcggctatcggaaggaggatttgcgctaccagaagacgaagcaggtcggctcgggcgcgtggctgaaggtgaaggggaagaagggtaccgaagcttacgtagaacaaaaactcatctcagaagaggatctgaatagcgccgtcgaccatcatcatcatcatcattga

SEQ ID NO: 242 - protein, 802 aa, Artificial Sequence
  Description of Artificial Sequence:Thermococcus species 9degreesN-7 mutant DNA polymerase, 9degreesN mutant
MILDTDYITENGKPVIRVFKKENGEFKIEYDRTFEPYFYALLKDDSAIEDVKKVTAKRHGTVVKVKRAEKVQKKFLGRPIEVWKLYFNHPQDVPAIRDRIRAHPAVVDIYEYDIPFAKRYLIDKGLIPMEGDEELTMLAFAIATLYHEGEEFGTGPILMISYADGSEARVITWKKIDLPYVDVVSTEKEMIKRFLRVVREKDPDVLITYNGDNFDFAYLKKRCEELGIKFTLGRDGSEPKIQRMGDRFAVEVKGRIHFDLYPVIRRTINLPTYTLEAVYEAVFGKPKEKVYAEEIAQAWESGEGLERVARYSMEDAKVTYELGREFFPMEAQLSRLIGQSLWDVSRSSTGNLVEWCLLRKAYKRNELAPNKPDERELARRRGGYAGGYVKEPERGLWDNIVYLDFRSLYPSIIITHNVSPDTLNREGCKEYDVAPEVGHKFCKDFPGFIPSLLGDLLEERQKIKRKMKATVDPLEKKLLVYRQWLIKILANSFYGYYGYAKARWYCKECAESVTAWGREYIEMVIRELEEKFGFKVLYADTDGLHATIPGADAETVKKKAKEFLKYINPKLPGLLELEYEGFYVRGFFVTKKKYAVIDEEGKITTRGLEIVRRDWSEIAKETQARVLEAILKHGDVEEAVRIVKEVTEKLSKYEVPPEKLVIHEQITRDLRDYKATGPHVAVAKRLAARGVKIRPGTVISYIVLKGSGRIGDRAIPADEFDPTKHRYDAEYYIENQVLPAVERILKAFGYRKEDLRYQKTKQVGSGAWLKVKGKKGTEAYVEQKLISEEDLNSAVDHHHHHH

SEQ ID NO: 243 - DNA, 2409 bp, Artificial Sequence
  Description of Artificial Sequence:Thermococcus species 9degreesN-7 mutant DNA polymerase, 9degreesN mutant
atgattctcgataccgactacatcaccgagaacgggaagcccgtgataagggtcttcaagaaggagaacggcgagtttaaaatcgagtacgacagaaccttcgagccctacttctacgcccttctgaaggacgattctgcgatagaggacgtcaagaaggtaaccgcaaagaggcacggaacggttgtcaaggtgaagcgcgccgagaaggtgcagaagaagttcctcggcaggccgatagaggtctggaagctctacttcaaccatcctcaggacgtcccggcgattcgagacaggatacgcgcccaccccgctgtcgttgacatctacgagtacgacatacccttcgccaagcgctacctcatcgacaagggcctgattccgatggagggcgacgaggagcttacgatgctcgccttcgcgatcgcaaccctctatcacgagggcgaggagttcggaaccgggccgattctcatgataagctacgccgacgggagcgaggcgagggtgataacctggaagaagattgaccttccgtacgttgacgtcgtctcgaccgagaaggagatgattaagcgcttcctccgcgtcgtcagggagaaggaccccgacgtgctcatcacctacaacggcgacaacttcgacttcgcctacctgaagaagcgctgtgaggaactcggaataaagttcacactcggcagggacgggagcgagccgaagatacagcgaatgggcgaccgctttgccgttgaggtgaagggcaggattcacttcgacctctaccccgtcataaggcgcacgataaacctcccgacctacacccttgaggccgtttacgaggccgtctttggaaagcccaaggagaaggtttacgcagaggagatagcgcaggcctgggagagcggggagggccttgaaagggttgcaagatactcgatggaggacgctaaggtgacctacgagctgggaagggagttcttcccgatggaggcccagctttcgaggcttataggccagagcctctgggacgtctcgcgctcgagcaccggaaatttggtggagtggcatctcctgcggaaggcctacaagaggaacgagctcgccccaaacaagcccgacgagagggagctcgcgagacggcgcgggggctacgctggcgggtacgttaaggaaccagagcggggattgtgggacaacattgtgtatttagacttccgctcgctgtatccttcaatcatcataacccacaacgtctcgccggataccctcaaccgcgagggctgtaaagagtacgacgtcgcccctgaggttggacacaagttctgcaaggacttccccggcttcataccaagcctcctgggagatttgctcgaggagaggcagaagataaagcggaagatgaaggcaacggttgacccgctggagaagaaactcctcgtgtacaggcagtggcttataaaaatcctcgccaacagcttctacggctactacggctacgccaaggcccggtggtactgcaaggagtgcgccgagagcgttacggcctggggaagggagtatatagaaatggttatccgggaactcgaagaaaaattcggttttaaagttctctatgccgatacagacggtctccatgctaccattcccggagcagacgctgaaacagtcaagaaaaaagcaaaggagttcttaaaatacattaatccaaaactgcccggcctgctcgaacttgagtacgagggcttctacgtgaggggcttcttcgtcacgaagaagaagtacgctgtgatagacgaggagggcaagataaccacgaggggtcttgagattgtgaggcgcgactggagcgagatagcgaaggagacccaggccagggtcttagaggcgatactcaagcacggtgacgtcgaggaggccgttaggatagtcaaggaagtgacggaaaagctgagcaagtatgaggtcccgcccgagaagctggtaatccacgagcagataacgcgcgatttgagggattacaaagccaccggcccgcacgttgccgttgcgaagaggctcgcggcgcgtggagtgaaaatccggcccggcacggtgataagctacatcgtcctaaagggctctggaaggataggcgacagggcgattccagctgatgagttcgacccgacgaagcaccgctacgatgcggaatactacatcgagaaccaggttctcccggcggtggagaggattctaaaagccttcggctatcggaaggaggatttgcgctaccagaagacgaagcaggtcggctcgggcgcgtggctgaaggtgaaggggaagaagggtaccgaagcttacgtagaacaaaaactcatctcagaagaggatctgaatagcgccgtcgaccatcatcatcatcatcattga

SEQ ID NO: 244 - protein, 802 aa, Artificial Sequence
  Description of Artificial Sequence:Thermococcus species 9degreesN-7 mutant DNA polymerase, 9degreesN mutant
MILDTDYITENGKPVIRVFKKENGEFKIEYDRTFEPYFYALLKDDSAIEDVKKVTAKRHGTVVKVKRAEKVQKKFLGRPIEVWKLYFNHPQDVPAIRDRIRAHPAVVDIYEYDIPFAKRYLIDKGLIPMEGDEELTMLAFAIATLYHEGEEFGTGPILMISYADGSEARVITWKKIDLPYVDVVSTEKEMIKRFLRVVREKDPDVLITYNGDNFDFAYLKKRCEELGIKFTLGRDGSEPKIQRMGDRFAVEVKGRIHFDLYPVIRRTINLPTYTLEAVYEAVFGKPKEKVYAEEIAQAWESGEGLERVARYSMEDAKVTYELGREFFPMEAQLSRLIGQSLWDVSRSSTGNLVEWHLLRKAYKRNELAPNKPDERELARRRGGYAGGYVKEPERGLWDNIVYLDFRSLYPSIIITHNVSPDTLNREGCKEYDVAPEVGHKFCKDFPGFIPSLLGDLLEERQKIKRKMKATVDPLEKKLLVYRQWLIKILANSFYGYYGYAKARWYCKECAESVTAWGREYIEMVIRELEEKFGFKVLYADTDGLHATIPGADAETVKKKAKEFLKYINPKLPGLLELEYEGFYVRGFFVTKKKYAVIDEEGKITTRGLEIVRRDWSEIAKETQARVLEAILKHGDVEEAVRIVKEVTEKLSKYEVPPEKLVIHEQITRDLRDYKATGPHVAVAKRLAARGVKIRPGTVISYIVLKGSGRIGDRAIPADEFDPTKHRYDAEYYIENQVLPAVERILKAFGYRKEDLRYQKTKQVGSGAWLKVKGKKGTEAYVEQKLISEEDLNSAVDHHHHHH

SEQ ID NO: 245 - DNA, 2409 bp, Artificial Sequence
  Description of Artificial Sequence:Thermococcus species 9degreesN-7 mutant DNA polymerase, 9degreesN mutant
atgattctcgataccgactacatcaccgagaacgggaagcccgtgataagggtcttcaagaaggagaacggcgagtttaaaatcgagtacgacagaaccttcgagccctacttctacgcccttctgaaggacgattctgcgatagaggacgtcaagaaggtaaccgcaaagaggcacggaacggttgtcaaggtgaagcgcgccgagaaggtgcagaagaagttcctcggcaggccgatagaggtctggaagctctacttcaaccatcctcaggacgtcccggcgattcgagacaggatacgcgcccaccccgctgtcgttgacatctacgagtacgacatacccttcgccaagcgctacctcatcgacaagggcctgattccgatggagggcgacgaggagcttacgatgctcgccttcgcgatcgcaaccctctatcacgagggcgaggagttcggaaccgggccgattctcatgataagctacgccgacgggagcgaggcgagggtgataacctggaagaagattgaccttccgtacgttgacgtcgtctcgaccgagaaggagatgattaagcgcttcctccgcgtcgtcagggagaaggaccccgacgtgctcatcacctacaacggcgacaacttcgacttcgcctacctgaagaagcgctgtgaggaactcggaataaagttcacactcggcagggacgggagcgagccgaagatacagcgaatgggcgaccgctttgccgttgaggtgaagggcaggattcacttcgacctctaccccgtcataaggcgcacgataaacctcccgacctacacccttgaggccgtttacgaggccgtctttggaaagcccaaggagaaggtttacgcagaggagatagcgcaggcctgggagagcggggagggccttgaaagggttgcaagatactcgatggaggacgctaaggtgacctacgagctgggaagggagttcttcccgatggaggcccagctttcgaggcttataggccagagcctctgggacgtctcgcgctcgagcaccggaaatttggtggagtggtacctcctgcggaaggcctacaagaggaacgagctcgccccaaacaagcccgacgagagggagctcgcgagacggcgcgggggctacgctggcgggtacgttaaggaaccagagcggggattgtgggacaacattgtgtatttagacttccgctcgctgtatccttcaatcatcataacccacaacgtctcgccggataccctcaaccgcgagggctgtaaagagtacgacgtcgcccctgaggttggacacaagttctgcaaggacttccccggcttcataccaagcctcctgggagatttgctcgaggagaggcagaagataaagcggaagatgaaggcaacggttgacccgctggagaagaaactcctcgtgtacaggcagtggcttataaaaatcctcgccaacagcttctacggctactacggctacgccaaggcccggtggtactgcaaggagtgcgccgagagcgttacggcctggggaagggagtatatagaaatggttatccgggaactcgaagaaaaattcggttttaaagttctctatgccgatacagacggtctccatgctaccattcccggagcagacgctgaaacagtcaagaaaaaagcaaaggagttcttaaaatacattaatccaaaactgcccggcctgctcgaacttgagtacgagggcttctacgtgaggggcttcttcgtcacgaagaagaagtacgctgtgatagacgaggagggcaagataaccacgaggggtcttgagattgtgaggcgcgactggagcgagatagcgaaggagacccaggccagggtcttagaggcgatactcaagcacggtgacgtcgaggaggccgttaggatagtcaaggaagtgacggaaaagctgagcaagtatgaggtcccgcccgagaagctggtaatccacgagcagataacgcgcgatttgagggattacaaagccaccggcccgcacgttgccgttgcgaagaggctcgcggcgcgtggagtgaaaatccggcccggcacggtgataagctacatcgtcctaaagggctctggaaggataggcgacagggcgattccagctgatgagttcgacccgacgaagcaccgctacgatgcggaatactacatcgagaaccaggttctcccggcggtggagaggattctaaaagccttcggctatcggaaggaggatttgcgctaccagaagacgaagcaggtcggctcgggcgcgtggctgaaggtgaaggggaagaagggtaccgaagcttacgtagaacaaaaactcatctcagaagaggatctgaatagcgccgtcgaccatcatcatcatcatcattga

SEQ ID NO: 246 - protein, 802 aa, Artificial Sequence
  Description of Artificial Sequence:Thermococcus species 9degreesN-7 mutant DNA polymerase, 9degreesN mutant
MILDTDYITENGKPVIRVFKKENGEFKIEYDRTFEPYFYALLKDDSAIEDVKKVTAKRHGTVVKVKRAEKVQKKFLGRPIEVWKLYFNHPQDVPAIRDRIRAHPAVVDIYEYDIPFAKRYLIDKGLIPMEGDEELTMLAFAIATLYHEGEEFGTGPILMISYADGSEARVITWKKIDLPYVDVVSTEKEMIKRFLRVVREKDPDVLITYNGDNFDFAYLKKRCEELGIKFTLGRDGSEPKIQRMGDRFAVEVKGRIHFDLYPVIRRTINLPTYTLEAVYEAVFGKPKEKVYAEEIAQAWESGEGLERVARYSMEDAKVTYELGREFFPMEAQLSRLIGQSLWDVSRSSTGNLVEWYLLRKAYKRNELAPNKPDERELARRRGGYAGGYVKEPERGLWDNIVYLDFRSLYPSIIITHNVSPDTLNREGCKEYDVAPEVGHKFCKDFPGFIPSLLGDLLEERQKIKRKMKATVDPLEKKLLVYRQWLIKILANSFYGYYGYAKARWYCKECAESVTAWGREYIEMVIRELEEKFGFKVLYADTDGLHATIPGADAETVKKKAKEFLKYINPKLPGLLELEYEGFYVRGFFVTKKKYAVIDEEGKITTRGLEIVRRDWSEIAKETQARVLEAILKHGDVEEAVRIVKEVTEKLSKYEVPPEKLVIHEQITRDLRDYKATGPHVAVAKRLAARGVKIRPGTVISYIVLKGSGRIGDRAIPADEFDPTKHRYDAEYYIENQVLPAVERILKAFGYRKEDLRYQKTKQVGSGAWLKVKGKKGTEAYVEQKLISEEDLNSAVDHHHHHH

SEQ ID NO: 247 - DNA, 2409 bp, Artificial Sequence
  Description of Artificial Sequence:Thermococcus species 9degreesN-7 mutant DNA polymerase, 9degreesN mutant
atgattctcgataccgactacatcaccgagaacgggaagcccgtgataagggtcttcaagaaggagaacggcgagtttaaaatcgagtacgacagaaccttcgagccctacttctacgcccttctgaaggacgattctgcgatagaggacgtcaagaaggtaaccgcaaagaggcacggaacggttgtcaaggtgaagcgcgccgagaaggtgcagaagaagttcctcggcaggccgatagaggtctggaagctctacttcaaccatcctcaggacgtcccggcgattcgagacaggatacgcgcccaccccgctgtcgttgacatctacgagtacgacatacccttcgccaagcgctacctcatcgacaagggcctgattccgatggagggcgacgaggagcttacgatgctcgccttcgcgatcgcaaccctctatcacgagggcgaggagttcggaaccgggccgattctcatgataagctacgccgacgggagcgaggcgagggtgataacctggaagaagattgaccttccgtacgttgacgtcgtctcgaccgagaaggagatgattaagcgcttcctccgcgtcgtcagggagaaggaccccgacgtgctcatcacctacaacggcgacaacttcgacttcgcctacctgaagaagcgctgtgaggaactcggaataaagttcacactcggcagggacgggagcgagccgaagatacagcgaatgggcgaccgctttgccgttgaggtgaagggcaggattcacttcgacctctaccccgtcataaggcgcacgataaacctcccgacctacacccttgaggccgtttacgaggccgtctttggaaagcccaaggagaaggtttacgcagaggagatagcgcaggcctgggagagcggggagggccttgaaagggttgcaagatactcgatggaggacgctaaggtgacctacgagctgggaagggagttcttcccgatggaggcccagctttcgaggcttataggccagagcctctgggacgtctcgcgctcgagcaccggaaatttggtggagtggttcctcctgcggaaggcctacaagaggaacgagctcgccccaaacaagcccgacgagagggagctcgcgagacggcgcgggggctacgctggcgggtacgttaaggaaccagagcggggattgtgggacaacattgtgtatttagacttccgctcgctgtatccttcaatcatcataacccacaacgtctcgccggataccctcaaccgcgagggctgtaaagagtacgacgtcgcccctgaggttggacacaagttctgcaaggacttccccggcttcataccaagcctcctgggagatttgctcgaggagaggcagaagataaagcggaagatgaaggcaacggttgacccgctggagaagaaactcctcgtgtacaggcagtggcttataaaaatcctcgccaacagcacgtacggctactacggctacgccaaggcccggtggtactgcaaggagtgcgccgagagcgttacggcctggggaagggagtatatagaaatggttatccgggaactcgaagaaaaattcggttttaaagttctctatgccgatacagacggtctccatgctaccattcccggagcagacgctgaaacagtcaagaaaaaagcaaaggagttcttaaaatacattaatccaaaactgcccggcctgctcgaacttgagtacgagggcttctacgtgaggggcttcttcgtcacgaagaagaagtacgctgtgatagacgaggagggcaagataaccacgaggggtcttgagattgtgaggcgcgactggagcgagatagcgaaggagacccaggccagggtcttagaggcgatactcaagcacggtgacgtcgaggaggccgttaggatagtcaaggaagtgacggaaaagctgagcaagtatgaggtcccgcccgagaagctggtaatccacgagcagataacgcgcgatttgagggattacaaagccaccggcccgcacgttgccgttgcgaagaggctcgcggcgcgtggagtgaaaatccggcccggcacggtgataagctacatcgtcctaaagggctctggaaggataggcgacagggcgattccagctgatgagttcgacccgacgaagcaccgctacgatgcggaatactacatcgagaaccaggttctcccggcggtggagaggattctaaaagccttcggctatcggaaggaggatttgcgctaccagaagacgaagcaggtcggctcgggcgcgtggctgaaggtgaaggggaagaagggtaccgaagcttacgtagaacaaaaactcatctcagaagaggatctgaatagcgccgtcgaccatcatcatcatcatcattga

SEQ ID NO: 248 - protein, 802 aa, Artificial Sequence
  Description of Artificial Sequence:Thermococcus species 9degreesN-7 mutant DNA polymerase, 9degreesN mutant
MILDTDYITENGKPVIRVFKKENGEFKIEYDRTFEPYFYALLKDDSAIEDVKKVTAKRHGTVVKVKRAEKVQKKFLGRPIEVWKLYFNHPQDVPAIRDRIRAHPAVVDIYEYDIPFAKRYLIDKGLIPMEGDEELTMLAFAIATLYHEGEEFGTGPILMISYADGSEARVITWKKIDLPYVDVVSTEKEMIKRFLRVVREKDPDVLITYNGDNFDFAYLKKRCEELGIKFTLGRDGSEPKIQRMGDRFAVEVKGRIHFDLYPVIRRTINLPTYTLEAVYEAVFGKPKEKVYAEEIAQAWESGEGLERVARYSMEDAKVTYELGREFFPMEAQLSRLIGQSLWDVSRSSTGNLVEWFLLRKAYKRNELAPNKPDERELARRRGGYAGGYVKEPERGLWDNIVYLDFRSLYPSIIITHNVSPDTLNREGCKEYDVAPEVGHKFCKDFPGFIPSLLGDLLEERQKIKRKMKATVDPLEKKLLVYRQWLIKILANSTYGYYGYAKARWYCKECAESVTAWGREYIEMVIRELEEKFGFKVLYADTDGLHATIPGADAETVKKKAKEFLKYINPKLPGLLELEYEGFYVRGFFVTKKKYAVIDEEGKITTRGLEIVRRDWSEIAKETQARVLEAILKHGDVEEAVRIVKEVTEKLSKYEVPPEKLVIHEQITRDLRDYKATGPHVAVAKRLAARGVKIRPGTVISYIVLKGSGRIGDRAIPADEFDPTKHRYDAEYYIENQVLPAVERILKAFGYRKEDLRYQKTKQVGSGAWLKVKGKKGTEAYVEQKLISEEDLNSAVDHHHHHH

SEQ ID NO: 249 - DNA, 2409 bp, Artificial Sequence
  Description of Artificial Sequence:Thermococcus species 9degreesN-7 mutant DNA polymerase, 9degreesN mutant
atgattctcgataccgactacatcaccgagaacgggaagcccgtgataagggtcttcaagaaggagaacggcgagtttaaaatcgagtacgacagaaccttcgagccctacttctacgcccttctgaaggacgattctgcgatagaggacgtcaagaaggtaaccgcaaagaggcacggaacggttgtcaaggtgaagcgcgccgagaaggtgcagaagaagttcctcggcaggccgatagaggtctggaagctctacttcaaccatcctcaggacgtcccggcgattcgagacaggatacgcgcccaccccgctgtcgttgacatctacgagtacgacatacccttcgccaagcgctacctcatcgacaagggcctgattccgatggagggcgacgaggagcttacgatgctcgccttcgcgatcgcaaccctctatcacgagggcgaggagttcggaaccgggccgattctcatgataagctacgccgacgggagcgaggcgagggtgataacctggaagaagattgaccttccgtacgttgacgtcgtctcgaccgagaaggagatgattaagcgcttcctccgcgtcgtcagggagaaggaccccgacgtgctcatcacctacaacggcgacaacttcgacttcgcctacctgaagaagcgctgtgaggaactcggaataaagttcacactcggcagggacgggagcgagccgaagatacagcgaatgggcgaccgctttgccgttgaggtgaagggcaggattcacttcgacctctaccccgtcataaggcgcacgataaacctcccgacctacacccttgaggccgtttacgaggccgtctttggaaagcccaaggagaaggtttacgcagaggagatagcgcaggcctgggagagcggggagggccttgaaagggttgcaagatactcgatggaggacgctaaggtgacctacgagctgggaagggagttcttcccgatggaggcccagctttcgaggcttataggccagagcctctgggacgtctcgcgctcgagcaccggaaatttggtggagtggttcctcctgcggaaggcctacaagaggaacgagctcgccccaaacaagcccgacgagagggagctcgcgagacggcgcgggggctacgctggcgggtacgttaaggaaccagagcggggattgtgggacaacattgtgtatttagacttccgctcgctgtatccttcaatcatcataacccacaacgtctcgccggataccctcaaccgcgagggctgtaaagagtacgacgtcgcccctgaggttggacacaagttctgcaaggacttccccggcttcataccaagcctcctgggagatttgctcgaggagaggcagaagataaagcggaagatgaaggcaacggttgacccgctggagaagaaactcctcgtgtacaggcagtggcttataaaaatcctcgccaacagcttctacggctacactggctacgccaaggcccggtggtactgcaaggagtgcgccgagagcgttacggcctggggaagggagtatatagaaatggttatccgggaactcgaagaaaaattcggttttaaagttctctatgccgatacagacggtctccatgctaccattcccggagcagacgctgaaacagtcaagaaaaaagcaaaggagttcttaaaatacattaatccaaaactgcccggcctgctcgaacttgagtacgagggcttctacgtgaggggcttcttcgtcacgaagaagaagtacgctgtgatagacgaggagggcaagataaccacgaggggtcttgagattgtgaggcgcgactggagcgagatagcgaaggagacccaggccagggtcttagaggcgatactcaagcacggtgacgtcgaggaggccgttaggatagtcaaggaagtgacggaaaagctgagcaagtatgaggtcccgcccgagaagctggtaatccacgagcagataacgcgcgatttgagggattacaaagccaccggcccgcacgttgccgttgcgaagaggctcgcggcgcgtggagtgaaaatccggcccggcacggtgataagctacatcgtcctaaagggctctggaaggataggcgacagggcgattccagctgatgagttcgacccgacgaagcaccgctacgatgcggaatactacatcgagaaccaggttctcccggcggtggagaggattctaaaagccttcggctatcggaaggaggatttgcgctaccagaagacgaagcaggtcggctcgggcgcgtggctgaaggtgaaggggaagaagggtaccgaagcttacgtagaacaaaaactcatctcagaagaggatctgaatagcgccgtcgaccatcatcatcatcatcattga

SEQ ID NO: 250 - protein, 802 aa, Artificial Sequence
  Description of Artificial Sequence:Thermococcus species 9degreesN-7 mutant DNA polymerase, 9degreesN mutant
MILDTDYITENGKPVIRVFKKENGEFKIEYDRTFEPYFYALLKDDSAIEDVKKVTAKRHGTVVKVKRAEKVQKKFLGRPIEVWKLYFNHPQDVPAIRDRIRAHPAVVDIYEYDIPFAKRYLIDKGLIPMEGDEELTMLAFAIATLYHEGEEFGTGPILMISYADGSEARVITWKKIDLPYVDVVSTEKEMIKRFLRVVREKDPDVLITYNGDNFDFAYLKKRCEELGIKFTLGRDGSEPKIQRMGDRFAVEVKGRIHFDLYPVIRRTINLPTYTLEAVYEAVFGKPKEKVYAEEIAQAWESGEGLERVARYSMEDAKVTYELGREFFPMEAQLSRLIGQSLWDVSRSSTGNLVEWFLLRKAYKRNELAPNKPDERELARRRGGYAGGYVKEPERGLWDNIVYLDFRSLYPSIIITHNVSPDTLNREGCKEYDVAPEVGHKFCKDFPGFIPSLLGDLLEERQKIKRKMKATVDPLEKKLLVYRQWLIKILANSFYGYTGYAKARWYCKECAESVTAWGREYIEMVIRELEEKFGFKVLYADTDGLHATIPGADAETVKKKAKEFLKYINPKLPGLLELEYEGFYVRGFFVTKKKYAVIDEEGKITTRGLEIVRRDWSEIAKETQARVLEAILKHGDVEEAVRIVKEVTEKLSKYEVPPEKLVIHEQITRDLRDYKATGPHVAVAKRLAARGVKIRPGTVISYIVLKGSGRIGDRAIPADEFDPTKHRYDAEYYIENQVLPAVERILKAFGYRKEDLRYQKTKQVGSGAWLKVKGKKGTEAYVEQKLISEEDLNSAVDHHHHHH

SEQ ID NO: 251 - DNA, 2409 bp, Artificial Sequence
  Description of Artificial Sequence:Thermococcus species 9degreesN-7 mutant DNA polymerase, 9degreesN mutant
atgattctcgataccgactacatcaccgagaacgggaagcccgtgataagggtcttcaagaaggagaacggcgagtttaaaatcgagtacgacagaaccttcgagccctacttctacgcccttctgaaggacgattctgcgatagaggacgtcaagaaggtaaccgcaaagaggcacggaacggttgtcaaggtgaagcgcgccgagaaggtgcagaagaagttcctcggcaggccgatagaggtctggaagctctacttcaaccatcctcaggacgtcccggcgattcgagacaggatacgcgcccaccccgctgtcgttgacatctacgagtacgacatacccttcgccaagcgctacctcatcgacaagggcctgattccgatggagggcgacgaggagcttacgatgctcgccttcgcgatcgcaaccctctatcacgagggcgaggagttcggaaccgggccgattctcatgataagctacgccgacgggagcgaggcgagggtgataacctggaagaagattgaccttccgtacgttgacgtcgtctcgaccgagaaggagatgattaagcgcttcctccgcgtcgtcagggagaaggaccccgacgtgctcatcacctacaacggcgacaacttcgacttcgcctacctgaagaagcgctgtgaggaactcggaataaagttcacactcggcagggacgggagcgagccgaagatacagcgaatgggcgaccgctttgccgttgaggtgaagggcaggattcacttcgacctctaccccgtcataaggcgcacgataaacctcccgacctacacccttgaggccgtttacgaggccgtctttggaaagcccaaggagaaggtttacgcagaggagatagcgcaggcctgggagagcggggagggccttgaaagggttgcaagatactcgatggaggacgctaaggtgacctacgagctgggaagggagttcttcccgatggaggcccagctttcgaggcttataggccagagcctctgggacgtctcgcgctcgagcaccggaaatttggtggagtggttcctcctgcggaaggcctacaagaggaacgagctcgccccaaacaagcccgacgagagggagctcgcgagacggcgcgggggctacgctggcgggtacgttaaggaaccagagcggggattgtgggacaacattgtgtatttagacttccgctcgctgtatccttcaatcatcataacccacaacgtctcgccggataccctcaaccgcgagggctgtaaagagtacgacgtcgcccctgaggttggacacaagttctgcaaggacttccccggcttctacccaagcctcctgggagatttgctcgaggagaggcagaagataaagcggaagatgaaggcaacggttgacccgctggagaagaaactcctcgtgtacaggcagtggcttataaaaatcctcgccaacagcttctacggctactacggctacgccaaggcccggtggtactgcaaggagtgcgccgagagcgttacggcctggggaagggagtatatagaaatggttatccgggaactcgaagaaaaattcggttttaaagttctctatgccgatacagacggtctccatgctaccattcccggagcagacgctgaaacagtcaagaaaaaagcaaaggagttcttaaaatacattaatccaaaactgcccggcctgctcgaacttgagtacgagggcttctacgtgaggggcttcttcgtcacgaagaagaagtacgctgtgatagacgaggagggcaagataaccacgaggggtcttgagattgtgaggcgcgactggagcgagatagcgaaggagacccaggccagggtcttagaggcgatactcaagcacggtgacgtcgaggaggccgttaggatagtcaaggaagtgacggaaaagctgagcaagtatgaggtcccgcccgagaagctggtaatccacgagcagataacgcgcgatttgagggattacaaagccaccggcccgcacgttgccgttgcgaagaggctcgcggcgcgtggagtgaaaatccggcccggcacggtgataagctacatcgtcctaaagggctctggaaggataggcgacagggcgattccagctgatgagttcgacccgacgaagcaccgctacgatgcggaatactacatcgagaaccaggttctcccggcggtggagaggattctaaaagccttcggctatcggaaggaggatttgcgctaccagaagacgaagcaggtcggctcgggcgcgtggctgaaggtgaaggggaagaagggtaccgaagcttacgtagaacaaaaactcatctcagaagaggatctgaatagcgccgtcgaccatcatcatcatcatcattga

SEQ ID NO: 252 - protein, 802 aa, Artificial Sequence
  Description of Artificial Sequence:Thermococcus species 9degreesN-7 mutant DNA polymerase, 9degreesN mutant
MILDTDYITENGKPVIRVFKKENGEFKIEYDRTFEPYFYALLKDDSAIEDVKKVTAKRHGTVVKVKRAEKVQKKFLGRPIEVWKLYFNHPQDVPAIRDRIRAHPAVVDIYEYDIPFAKRYLIDKGLIPMEGDEELTMLAFAIATLYHEGEEFGTGPILMISYADGSEARVITWKKIDLPYVDVVSTEKEMIKRFLRVVREKDPDVLITYNGDNFDFAYLKKRCEELGIKFTLGRDGSEPKIQRMGDRFAVEVKGRIHFDLYPVIRRTINLPTYTLEAVYEAVFGKPKEKVYAEEIAQAWESGEGLERVARYSMEDAKVTYELGREFFPMEAQLSRLIGQSLWDVSRSSTGNLVEWFLLRKAYKRNELAPNKPDERELARRRGGYAGGYVKEPERGLWDNIVYLDFRSLYPSIIITHNVSPDTLNREGCKEYDVAPEVGHKFCKDFPGFYPSLLGDLLEERQKIKRKMKATVDPLEKKLLVYRQWLIKILANSFYGYYGYAKARWYCKECAESVTAWGREYIEMVIRELEEKFGFKVLYADTDGLHATIPGADAETVKKKAKEFLKYINPKLPGLLELEYEGFYVRGFFVTKKKYAVIDEEGKITTRGLEIVRRDWSEIAKETQARVLEAILKHGDVEEAVRIVKEVTEKLSKYEVPPEKLVIHEQITRDLRDYKATGPHVAVAKRLAARGVKIRPGTVISYIVLKGSGRIGDRAIPADEFDPTKHRYDAEYYIENQVLPAVERILKAFGYRKEDLRYQKTKQVGSGAWLKVKGKKGTEAYVEQKLISEEDLNSAVDHHHHHH

SEQ ID NO: 253 - DNA, 2409 bp, Artificial Sequence
  Description of Artificial Sequence:Thermococcus species 9degreesN-7 mutant DNA polymerase, 9degreesN mutant
atgattctcgataccgactacatcaccgagaacgggaagcccgtgataagggtcttcaagaaggagaacggcgagtttaaaatcgagtacgacagaaccttcgagccctacttctacgcccttctgaaggacgattctgcgatagaggacgtcaagaaggtaaccgcaaagaggcacggaacggttgtcaaggtgaagcgcgccgagaaggtgcagaagaagttcctcggcaggccgatagaggtctggaagctctacttcaaccatcctcaggacgtcccggcgattcgagacaggatacgcgcccaccccgctgtcgttgacatctacgagtacgacatacccttcgccaagcgctacctcatcgacaagggcctgattccgatggagggcgacgaggagcttacgatgctcgccttcgcgatcgcaaccctctatcacgagggcgaggagttcggaaccgggccgattctcatgataagctacgccgacgggagcgaggcgagggtgataacctggaagaagattgaccttccgtacgttgacgtcgtctcgaccgagaaggagatgattaagcgcttcctccgcgtcgtcagggagaaggaccccgacgtgctcatcacctacaacggcgacaacttcgacttcgcctacctgaagaagcgctgtgaggaactcggaataaagttcacactcggcagggacgggagcgagccgaagatacagcgaatgggcgaccgctttgccgttgaggtgaagggcaggattcacttcgacctctaccccgtcataaggcgcacgataaacctcccgacctacacccttgaggccgtttacgaggccgtctttggaaagcccaaggagaaggtttacgcagaggagatagcgcaggcctgggagagcggggagggccttgaaagggttgcaagatactcgatggaggacgctaaggtgacctacgagctgggaagggagttcttcccgatggaggcccagctttcgaggcttataggccagagcctctgggacgtctcgcgctcgagcaccggaaatttggtggagtggttcctcctgcggaaggcctacaagaggaacgagctcgccccaaacaagcccgacgagagggagctcgcgagacggcgcgggggctacgctggcgggtacgttaaggaaccagagcggggattgtgggacaacattgtgtatttagacttccgctcgctgtatccttcaatcatcataacccacaacgtctcgccggataccctcaaccgcgagggctgtaaagagtacgacgtcgcccctgaggttggacacaagttctgcaaggacttccccggcttcataccaagcctcctgggagatttgctcgaggagaggcagaagataaagcggaagatgaaggcaacggttgacccgctggagaagtggctcctcgtgtacaggcagtggcttataaaaatcctcgccaacagcttctacggctactacggctacgccaaggcccggtggtactgcaaggagtgcgccgagagcgttacggcctggggaagggagtatatagaaatggttatccgggaactcgaagaaaaattcggttttaaagttctctatgccgatacagacggtctccatgctaccattcccggagcagacgctgaaacagtcaagaaaaaagcaaaggagttcttaaaatacattaatccaaaactgcccggcctgctcgaacttgagtacgagggcttctacgtgaggggcttcttcgtcacgaagaagaagtacgctgtgatagacgaggagggcaagataaccacgaggggtcttgagattgtgaggcgcgactggagcgagatagcgaaggagacccaggccagggtcttagaggcgatactcaagcacggtgacgtcgaggaggccgttaggatagtcaaggaagtgacggaaaagctgagcaagtatgaggtcccgcccgagaagctggtaatccacgagcagataacgcgcgatttgagggattacaaagccaccggcccgcacgttgccgttgcgaagaggctcgcggcgcgtggagtgaaaatccggcccggcacggtgataagctacatcgtcctaaagggctctggaaggataggcgacagggcgattccagctgatgagttcgacccgacgaagcaccgctacgatgcggaatactacatcgagaaccaggttctcccggcggtggagaggattctaaaagccttcggctatcggaaggaggatttgcgctaccagaagacgaagcaggtcggctcgggcgcgtggctgaaggtgaaggggaagaagggtaccgaagcttacgtagaacaaaaactcatctcagaagaggatctgaatagcgccgtcgaccatcatcatcatcatcattga

SEQ ID NO: 254 - protein, 802 aa, Artificial Sequence
  Description of Artificial Sequence:Thermococcus species 9degreesN-7 mutant DNA polymerase, 9degreesN mutant
MILDTDYITENGKPVIRVFKKENGEFKIEYDRTFEPYFYALLKDDSAIEDVKKVTAKRHGTVVKVKRAEKVQKKFLGRPIEVWKLYFNHPQDVPAIRDRIRAHPAVVDIYEYDIPFAKRYLIDKGLIPMEGDEELTMLAFAIATLYHEGEEFGTGPILMISYADGSEARVITWKKIDLPYVDVVSTEKEMIKRFLRVVREKDPDVLITYNGDNFDFAYLKKRCEELGIKFTLGRDGSEPKIQRMGDRFAVEVKGRIHFDLYPVIRRTINLPTYTLEAVYEAVFGKPKEKVYAEEIAQAWESGEGLERVARYSMEDAKVTYELGREFFPMEAQLSRLIGQSLWDVSRSSTGNLVEWFLLRKAYKRNELAPNKPDERELARRRGGYAGGYVKEPERGLWDNIVYLDFRSLYPSIIITHNVSPDTLNREGCKEYDVAPEVGHKFCKDFPGFIPSLLGDLLEERQKIKRKMKATVDPLEKWLLVYRQWLIKILANSFYGYYGYAKARWYCKECAESVTAWGREYIEMVIRELEEKFGFKVLYADTDGLHATIPGADAETVKKKAKEFLKYINPKLPGLLELEYEGFYVRGFFVTKKKYAVIDEEGKITTRGLEIVRRDWSEIAKETQARVLEAILKHGDVEEAVRIVKEVTEKLSKYEVPPEKLVIHEQITRDLRDYKATGPHVAVAKRLAARGVKIRPGTVISYIVLKGSGRIGDRAIPADEFDPTKHRYDAEYYIENQVLPAVERILKAFGYRKEDLRYQKTKQVGSGAWLKVKGKKGTEAYVEQKLISEEDLNSAVDHHHHHH

SEQ ID NO: 255 - DNA, 2409 bp, Artificial Sequence
  Description of Artificial Sequence:Thermococcus species 9degreesN-7 mutant DNA polymerase, 9degreesN mutant
atgattctcgataccgactacatcaccgagaacgggaagcccgtgataagggtcttcaagaaggagaacggcgagtttaaaatcgagtacgacagaaccttcgagccctacttctacgcccttctgaaggacgattctgcgatagaggacgtcaagaaggtaaccgcaaagaggcacggaacggttgtcaaggtgaagcgcgccgagaaggtgcagaagaagttcctcggcaggccgatagaggtctggaagctctacttcaaccatcctcaggacgtcccggcgattcgagacaggatacgcgcccaccccgctgtcgttgacatctacgagtacgacatacccttcgccaagcgctacctcatcgacaagggcctgattccgatggagggcgacgaggagcttacgatgctcgccttcgcgatcgcaaccctctatcacgagggcgaggagttcggaaccgggccgattctcatgataagctacgccgacgggagcgaggcgagggtgataacctggaagaagattgaccttccgtacgttgacgtcgtctcgaccgagaaggagatgattaagcgcttcctccgcgtcgtcagggagaaggaccccgacgtgctcatcacctacaacggcgacaacttcgacttcgcctacctgaagaagcgctgtgaggaactcggaataaagttcacactcggcagggacgggagcgagccgaagatacagcgaatgggcgaccgctttgccgttgaggtgaagggcaggattcacttcgacctctaccccgtcataaggcgcacgataaacctcccgacctacacccttgaggccgtttacgaggccgtctttggaaagcccaaggagaaggtttacgcagaggagatagcgcaggcctgggagagcggggagggccttgaaagggttgcaagatactcgatggaggacgctaaggtgacctacgagctgggaagggagttcttcccgatggaggcccagctttcgaggtggataggccagagcctctgggacgtctcgcgctcgagcaccggaaatttggtggagtggttcctcctgcggaaggcctacaagaggaacgagctcgccccaaacaagcccgacgagagggagctcgcgagacggcgcgggggctacgctggcgggtacgttaaggaaccagagcggggattgtgggacaacattgtgtatttagacttccgctcgctgtatccttcaatcatcataacccacaacgtctcgccggataccctcaaccgcgagggctgtaaagagtacgacgtcgcccctgaggttggacacaagttctgcaaggacttccccggcttcataccaagcctcctgggagatttgctcgaggagaggcagaagataaagcggaagatgaaggcaacggttgacccgctggagaagaaactcctcgtgtacaggcagtggcttataaaaatcctcgccaacagcttctacggctactacggctacgccaaggcccggtggtactgcaaggagtgcgccgagagcgttacggcctggggaagggagtatatagaaatggttatccgggaactcgaagaaaaattcggttttaaagttctctatgccgatacagacggtctccatgctaccattcccggagcagacgctgaaacagtcaagaaaaaagcaaaggagttcttaaaatacattaatccaaaactgcccggcctgctcgaacttgagtacgagggcttctacgtgaggggcttcttcgtcacgaagaagaagtacgctgtgatagacgaggagggcaagataaccacgaggggtcttgagattgtgaggcgcgactggagcgagatagcgaaggagacccaggccagggtcttagaggcgatactcaagcacggtgacgtcgaggaggccgttaggatagtcaaggaagtgacggaaaagctgagcaagtatgaggtcccgcccgagaagctggtaatccacgagcagataacgcgcgatttgagggattacaaagccaccggcccgcacgttgccgttgcgaagaggctcgcggcgcgtggagtgaaaatccggcccggcacggtgataagctacatcgtcctaaagggctctggaaggataggcgacagggcgattccagctgatgagttcgacccgacgaagcaccgctacgatgcggaatactacatcgagaaccaggttctcccggcggtggagaggattctaaaagccttcggctatcggaaggaggatttgcgctaccagaagacgaagcaggtcggctcgggcgcgtggctgaaggtgaaggggaagaagggtaccgaagcttacgtagaacaaaaactcatctcagaagaggatctgaatagcgccgtcgaccatcatcatcatcatcattga

SEQ ID NO: 256 - protein, 802 aa, Artificial Sequence
  Description of Artificial Sequence:Thermococcus species 9degreesN-7 mutant DNA polymerase, 9degreesN mutant
MILDTDYITENGKPVIRVFKKENGEFKIEYDRTFEPYFYALLKDDSAIEDVKKVTAKRHGTVVKVKRAEKVQKKFLGRPIEVWKLYFNHPQDVPAIRDRIRAHPAVVDIYEYDIPFAKRYLIDKGLIPMEGDEELTMLAFAIATLYHEGEEFGTGPILMISYADGSEARVITWKKIDLPYVDVVSTEKEMIKRFLRVVREKDPDVLITYNGDNFDFAYLKKRCEELGIKFTLGRDGSEPKIQRMGDRFAVEVKGRIHFDLYPVIRRTINLPTYTLEAVYEAVFGKPKEKVYAEEIAQAWESGEGLERVARYSMEDAKVTYELGREFFPMEAQLSRWIGQSLWDVSRSSTGNLVEWFLLRKAYKRNELAPNKPDERELARRRGGYAGGYVKEPERGLWDNIVYLDFRSLYPSIIITHNVSPDTLNREGCKEYDVAPEVGHKFCKDFPGFIPSLLGDLLEERQKIKRKMKATVDPLEKKLLVYRQWLIKILANSFYGYYGYAKARWYCKECAESVTAWGREYIEMVIRELEEKFGFKVLYADTDGLHATIPGADAETVKKKAKEFLKYINPKLPGLLELEYEGFYVRGFFVTKKKYAVIDEEGKITTRGLEIVRRDWSEIAKETQARVLEAILKHGDVEEAVRIVKEVTEKLSKYEVPPEKLVIHEQITRDLRDYKATGPHVAVAKRLAARGVKIRPGTVISYIVLKGSGRIGDRAIPADEFDPTKHRYDAEYYIENQVLPAVERILKAFGYRKEDLRYQKTKQVGSGAWLKVKGKKGTEAYVEQKLISEEDLNSAVDHHHHHH

SEQ ID NO: 257 - DNA, 2409 bp, Artificial Sequence
  Description of Artificial Sequence:Thermococcus species 9degreesN-7 mutant DNA polymerase, 9degreesN mutant
atgattctcgataccgactacatcaccgagaacgggaagcccgtgataagggtcttcaagaaggagaacggcgagtttaaaatcgagtacgacagaaccttcgagccctacttctacgcccttctgaaggacgattctgcgatagaggacgtcaagaaggtaaccgcaaagaggcacggaacggttgtcaaggtgaagcgcgccgagaaggtgcagaagaagttcctcggcaggccgatagaggtctggaagctctacttcaaccatcctcaggacgtcccggcgattcgagacaggatacgcgcccaccccgctgtcgttgacatctacgagtacgacatacccttcgccaagcgctacctcatcgacaagggcctgattccgatggagggcgacgaggagcttacgatgctcgccttcgcgatcgcaaccctctatcacgagggcgaggagttcggaaccgggccgattctcatgataagctacgccgacgggagcgaggcgagggtgataacctggaagaagattgaccttccgtacgttgacgtcgtctcgaccgagaaggagatgattaagcgcttcctccgcgtcgtcagggagaaggaccccgacgtgctcatcacctacaacggcgacaacttcgacttcgcctacctgaagaagcgctgtgaggaactcggaataaagttcacactcggcagggacgggagcgagccgaagatacagcgaatgggcgaccgctttgccgttgaggtgaagggcaggattcacttcgacctctaccccgtcataaggcgcacgataaacctcccgacctacacccttgaggccgtttacgaggccgtctttggaaagcccaaggagaaggtttacgcagaggagatagcgcaggcctgggagagcggggagggccttgaaagggttgcaagatactcgatggaggacgctaaggtgacctacgagctgggaagggagttcttcccgatggaggcccagctttcgaggttcataggccagagcctctgggacgtctcgcgctcgagcaccggaaatttggtggagtggttcctcctgcggaaggcctacaagaggaacgagctcgccccaaacaagcccgacgagagggagctcgcgagacggcgcgggggctacgctggcgggtacgttaaggaaccagagcggggattgtgggacaacattgtgtatttagacttccgctcgctgtatccttcaatcatcataacccacaacgtctcgccggataccctcaaccgcgagggctgtaaagagtacgacgtcgcccctgaggttggacacaagttctgcaaggacttccccggcttcataccaagcctcctgggagatttgctcgaggagaggcagaagataaagcggaagatgaaggcaacggttgacccgctggagaagaaactcctcgtgtacaggcagtggcttataaaaatcctcgccaacagcttctacggctactacggctacgccaaggcccggtggtactgcaaggagtgcgccgagagcgttacggcctggggaagggagtatatagaaatggttatccgggaactcgaagaaaaattcggttttaaagttctctatgccgatacagacggtctccatgctaccattcccggagcagacgctgaaacagtcaagaaaaaagcaaaggagttcttaaaatacattaatccaaaactgcccggcctgctcgaacttgagtacgagggcttctacgtgaggggcttcttcgtcacgaagaagaagtacgctgtgatagacgaggagggcaagataaccacgaggggtcttgagattgtgaggcgcgactggagcgagatagcgaaggagacccaggccagggtcttagaggcgatactcaagcacggtgacgtcgaggaggccgttaggatagtcaaggaagtgacggaaaagctgagcaagtatgaggtcccgcccgagaagctggtaatccacgagcagataacgcgcgatttgagggattacaaagccaccggcccgcacgttgccgttgcgaagaggctcgcggcgcgtggagtgaaaatccggcccggcacggtgataagctacatcgtcctaaagggctctggaaggataggcgacagggcgattccagctgatgagttcgacccgacgaagcaccgctacgatgcggaatactacatcgagaaccaggttctcccggcggtggagaggattctaaaagccttcggctatcggaaggaggatttgcgctaccagaagacgaagcaggtcggctcgggcgcgtggctgaaggtgaaggggaagaagggtaccgaagcttacgtagaacaaaaactcatctcagaagaggatctgaatagcgccgtcgaccatcatcatcatcatcattga

SEQ ID NO: 258 - protein, 802 aa, Artificial Sequence
  Description of Artificial Sequence:Thermococcus species 9degreesN-7 mutant DNA polymerase, 9degreesN mutant
MILDTDYITENGKPVIRVFKKENGEFKIEYDRTFEPYFYALLKDDSAIEDVKKVTAKRHGTVVKVKRAEKVQKKFLGRPIEVWKLYFNHPQDVPAIRDRIRAHPAVVDIYEYDIPFAKRYLIDKGLIPMEGDEELTMLAFAIATLYHEGEEFGTGPILMISYADGSEARVITWKKIDLPYVDVVSTEKEMIKRFLRVVREKDPDVLITYNGDNFDFAYLKKRCEELGIKFTLGRDGSEPKIQRMGDRFAVEVKGRIHFDLYPVIRRTINLPTYTLEAVYEAVFGKPKEKVYAEEIAQAWESGEGLERVARYSMEDAKVTYELGREFFPMEAQLSRFIGQSLWDVSRSSTGNLVEWFLLRKAYKRNELAPNKPDERELARRRGGYAGGYVKEPERGLWDNIVYLDFRSLYPSIIITHNVSPDTLNREGCKEYDVAPEVGHKFCKDFPGFIPSLLGDLLEERQKIKRKMKATVDPLEKKLLVYRQWLIKILANSFYGYYGYAKARWYCKECAESVTAWGREYIEMVIRELEEKFGFKVLYADTDGLHATIPGADAETVKKKAKEFLKYINPKLPGLLELEYEGFYVRGFFVTKKKYAVIDEEGKITTRGLEIVRRDWSEIAKETQARVLEAILKHGDVEEAVRIVKEVTEKLSKYEVPPEKLVIHEQITRDLRDYKATGPHVAVAKRLAARGVKIRPGTVISYIVLKGSGRIGDRAIPADEFDPTKHRYDAEYYIENQVLPAVERILKAFGYRKEDLRYQKTKQVGSGAWLKVKGKKGTEAYVEQKLISEEDLNSAVDHHHHHH

SEQ ID NO: 259 - DNA, 2409 bp, Artificial Sequence
  Description of Artificial Sequence:Thermococcus species 9degreesN-7 mutant DNA polymerase, 9degreesN mutant
atgattctcgataccgactacatcaccgagaacgggaagcccgtgataagggtcttcaagaaggagaacggcgagtttaaaatcgagtacgacagaaccttcgagccctacttctacgcccttctgaaggacgattctgcgatagaggacgtcaagaaggtaaccgcaaagaggcacggaacggttgtcaaggtgaagcgcgccgagaaggtgcagaagaagttcctcggcaggccgatagaggtctggaagctctacttcaaccatcctcaggacgtcccggcgattcgagacaggatacgcgcccaccccgctgtcgttgacatctacgagtacgacatacccttcgccaagcgctacctcatcgacaagggcctgattccgatggagggcgacgaggagcttacgatgctcgccttcgcgatcgcaaccctctatcacgagggcgaggagttcggaaccgggccgattctcatgataagctacgccgacgggagcgaggcgagggtgataacctggaagaagattgaccttccgtacgttgacgtcgtctcgaccgagaaggagatgattaagcgcttcctccgcgtcgtcagggagaaggaccccgacgtgctcatcacctacaacggcgacaacttcgacttcgcctacctgaagaagcgctgtgaggaactcggaataaagttcacactcggcagggacgggagcgagccgaagatacagcgaatgggcgaccgctttgccgttgaggtgaagggcaggattcacttcgacctctaccccgtcataaggcgcacgataaacctcccgacctacacccttgaggccgtttacgaggccgtctttggaaagcccaaggagaaggtttacgcagaggagatagcgcaggcctgggagagcggggagggccttgaaagggttgcaagatactcgatggaggacgctaaggtgacctacgagctgggaagggagttcttcccgatggaggcccagctttcgaggcttataggccagagcctctgggacgtctcgcgctcgagcaccggaaatttggtggagtggttccaactgcggaaggcctacaagaggaacgagctcgccccaaacaagcccgacgagagggagctcgcgagacggcgcgggggctacgctggcgggtacgttaaggaaccagagcggggattgtgggacaacattgtgtatttagacttccgctcgctgtatccttcaatcatcataacccacaacgtctcgccggataccctcaaccgcgagggctgtaaagagtacgacgtcgcccctgaggttggacacaagttctgcaaggacttccccggcttcataccaagcctcctgggagatttgctcgaggagaggcagaagataaagcggaagatgaaggcaacggttgacccgctggagaagaaactcctcgtgtacaggcagtggcttataaaaatcctcgccaacagcttctacggctactacggctacgccaaggcccggtggtactgcaaggagtgcgccgagagcgttacggcctggggaagggagtatatagaaatggttatccgggaactcgaagaaaaattcggttttaaagttctctatgccgatacagacggtctccatgctaccattcccggagcagacgctgaaacagtcaagaaaaaagcaaaggagttcttaaaatacattaatccaaaactgcccggcctgctcgaacttgagtacgagggcttctacgtgaggggcttcttcgtcacgaagaagaagtacgctgtgatagacgaggagggcaagataaccacgaggggtcttgagattgtgaggcgcgactggagcgagatagcgaaggagacccaggccagggtcttagaggcgatactcaagcacggtgacgtcgaggaggccgttaggatagtcaaggaagtgacggaaaagctgagcaagtatgaggtcccgcccgagaagctggtaatccacgagcagataacgcgcgatttgagggattacaaagccaccggcccgcacgttgccgttgcgaagaggctcgcggcgcgtggagtgaaaatccggcccggcacggtgataagctacatcgtcctaaagggctctggaaggataggcgacagggcgattccagctgatgagttcgacccgacgaagcaccgctacgatgcggaatactacatcgagaaccaggttctcccggcggtggagaggattctaaaagccttcggctatcggaaggaggatttgcgctaccagaagacgaagcaggtcggctcgggcgcgtggctgaaggtgaaggggaagaagggtaccgaagcttacgtagaacaaaaactcatctcagaagaggatctgaatagcgccgtcgaccatcatcatcatcatcattga

SEQ ID NO: 260 - protein, 802 aa, Artificial Sequence
  Description of Artificial Sequence:Thermococcus species 9degreesN-7 mutant DNA polymerase, 9degreesN mutant
MILDTDYITENGKPVIRVFKKENGEFKIEYDRTFEPYFYALLKDDSAIEDVKKVTAKRHGTVVKVKRAEKVQKKFLGRPIEVWKLYFNHPQDVPAIRDRIRAHPAVVDIYEYDIPFAKRYLIDKGLIPMEGDEELTMLAFAIATLYHEGEEFGTGPILMISYADGSEARVITWKKIDLPYVDVVSTEKEMIKRFLRVVREKDPDVLITYNGDNFDFAYLKKRCEELGIKFTLGRDGSEPKIQRMGDRFAVEVKGRIHFDLYPVIRRTINLPTYTLEAVYEAVFGKPKEKVYAEEIAQAWESGEGLERVARYSMEDAKVTYELGREFFPMEAQLSRLIGQSLWDVSRSSTGNLVEWFQLRKAYKRNELAPNKPDERELARRRGGYAGGYVKEPERGLWDNIVYLDFRSLYPSIIITHNVSPDTLNREGCKEYDVAPEVGHKFCKDFPGFIPSLLGDLLEERQKIKRKMKATVDPLEKKLLVYRQWLIKILANSFYGYYGYAKARWYCKECAESVTAWGREYIEMVIRELEEKFGFKVLYADTDGLHATIPGADAETVKKKAKEFLKYINPKLPGLLELEYEGFYVRGFFVTKKKYAVIDEEGKITTRGLEIVRRDWSEIAKETQARVLEAILKHGDVEEAVRIVKEVTEKLSKYEVPPEKLVIHEQITRDLRDYKATGPHVAVAKRLAARGVKIRPGTVISYIVLKGSGRIGDRAIPADEFDPTKHRYDAEYYIENQVLPAVERILKAFGYRKEDLRYQKTKQVGSGAWLKVKGKKGTEAYVEQKLISEEDLNSAVDHHHHHH

SEQ ID NO: 261 - DNA, 2409 bp, Artificial Sequence
  Description of Artificial Sequence:Thermococcus species 9degreesN-7 mutant DNA polymerase, 9degreesN mutant
atgattctcgataccgactacatcaccgagaacgggaagcccgtgataagggtcttcaagaaggagaacggcgagtttaaaatcgagtacgacagaaccttcgagccctacttctacgcccttctgaaggacgattctgcgatagaggacgtcaagaaggtaaccgcaaagaggcacggaacggttgtcaaggtgaagcgcgccgagaaggtgcagaagaagttcctcggcaggccgatagaggtctggaagctctacttcaaccatcctcaggacgtcccggcgattcgagacaggatacgcgcccaccccgctgtcgttgacatctacgagtacgacatacccttcgccaagcgctacctcatcgacaagggcctgattccgatggagggcgacgaggagcttacgatgctcgccttcgcgatcgcaaccctctatcacgagggcgaggagttcggaaccgggccgattctcatgataagctacgccgacgggagcgaggcgagggtgataacctggaagaagattgaccttccgtacgttgacgtcgtctcgaccgagaaggagatgattaagcgcttcctccgcgtcgtcagggagaaggaccccgacgtgctcatcacctacaacggcgacaacttcgacttcgcctacctgaagaagcgctgtgaggaactcggaataaagttcacactcggcagggacgggagcgagccgaagatacagcgaatgggcgaccgctttgccgttgaggtgaagggcaggattcacttcgacctctaccccgtcataaggcgcacgataaacctcccgacctacacccttgaggccgtttacgaggccgtctttggaaagcccaaggagaaggtttacgcagaggagatagcgcaggcctgggagagcggggagggccttgaaagggttgcaagatactcgatggaggacgctaaggtgacctacgagctgggaagggagttcttcccgatggaggcccagctttcgaggcttataggccagagcctctgggacgtctcgcgctcgagcaccggaaatttggtggagtggttcctcctgcggaaggcctacaagaggaacgagctcgccccaaacaagcccgacgagagggagctcgcgagacggcgcgggggctacgctggcgggtacgttaaggaaccagagcggggattgtgggacaacattgtgtatttagacttccgctcgttctatccttcaatcatcataacccacaacgtctcgccggataccctcaaccgcgagggctgtaaagagtacgacgtcgcccctgaggttggacacaagttctgcaaggacttccccggcttcataccaagcctcctgggagatttgctcgaggagaggcagaagataaagcggaagatgaaggcaacggttgacccgctggagaagaaactcctcgtgtacaggcagtggcttataaaaatcctcgccaacagcttctacggctactacggctacgccaaggcccggtggtactgcaaggagtgcgccgagagcgttacggcctggggaagggagtatatagaaatggttatccgggaactcgaagaaaaattcggttttaaagttctctatgccgatacagacggtctccatgctaccattcccggagcagacgctgaaacagtcaagaaaaaagcaaaggagttcttaaaatacattaatccaaaactgcccggcctgctcgaacttgagtacgagggcttctacgtgaggggcttcttcgtcacgaagaagaagtacgctgtgatagacgaggagggcaagataaccacgaggggtcttgagattgtgaggcgcgactggagcgagatagcgaaggagacccaggccagggtcttagaggcgatactcaagcacggtgacgtcgaggaggccgttaggatagtcaaggaagtgacggaaaagctgagcaagtatgaggtcccgcccgagaagctggtaatccacgagcagataacgcgcgatttgagggattacaaagccaccggcccgcacgttgccgttgcgaagaggctcgcggcgcgtggagtgaaaatccggcccggcacggtgataagctacatcgtcctaaagggctctggaaggataggcgacagggcgattccagctgatgagttcgacccgacgaagcaccgctacgatgcggaatactacatcgagaaccaggttctcccggcggtggagaggattctaaaagccttcggctatcggaaggaggatttgcgctaccagaagacgaagcaggtcggctcgggcgcgtggctgaaggtgaaggggaagaagggtaccgaagcttacgtagaacaaaaactcatctcagaagaggatctgaatagcgccgtcgaccatcatcatcatcatcattga

SEQ ID NO: 262 - protein, 802 aa, Artificial Sequence
  Description of Artificial Sequence:Thermococcus species 9degreesN-7 mutant DNA polymerase, 9degreesN mutant
MILDTDYITENGKPVIRVFKKENGEFKIEYDRTFEPYFYALLKDDSAIEDVKKVTAKRHGTVVKVKRAEKVQKKFLGRPIEVWKLYFNHPQDVPAIRDRIRAHPAVVDIYEYDIPFAKRYLIDKGLIPMEGDEELTMLAFAIATLYHEGEEFGTGPILMISYADGSEARVITWKKIDLPYVDVVSTEKEMIKRFLRVVREKDPDVLITYNGDNFDFAYLKKRCEELGIKFTLGRDGSEPKIQRMGDRFAVEVKGRIHFDLYPVIRRTINLPTYTLEAVYEAVFGKPKEKVYAEEIAQAWESGEGLERVARYSMEDAKVTYELGREFFPMEAQLSRLIGQSLWDVSRSSTGNLVEWFLLRKAYKRNELAPNKPDERELARRRGGYAGGYVKEPERGLWDNIVYLDFRSFYPSIIITHNVSPDTLNREGCKEYDVAPEVGHKFCKDFPGFIPSLLGDLLEERQKIKRKMKATVDPLEKKLLVYRQWLIKILANSFYGYYGYAKARWYCKECAESVTAWGREYIEMVIRELEEKFGFKVLYADTDGLHATIPGADAETVKKKAKEFLKYINPKLPGLLELEYEGFYVRGFFVTKKKYAVIDEEGKITTRGLEIVRRDWSEIAKETQARVLEAILKHGDVEEAVRIVKEVTEKLSKYEVPPEKLVIHEQITRDLRDYKATGPHVAVAKRLAARGVKIRPGTVISYIVLKGSGRIGDRAIPADEFDPTKHRYDAEYYIENQVLPAVERILKAFGYRKEDLRYQKTKQVGSGAWLKVKGKKGTEAYVEQKLISEEDLNSAVDHHHHHH

SEQ ID NO: 263 - DNA, 2409 bp, Artificial Sequence
  Description of Artificial Sequence:Thermococcus species 9degreesN-7 mutant DNA polymerase, 9degreesN mutant
atgattctcgataccgactacatcaccgagaacgggaagcccgtgataagggtcttcaagaaggagaacggcgagtttaaaatcgagtacgacagaaccttcgagccctacttctacgcccttctgaaggacgattctgcgatagaggacgtcaagaaggtaaccgcaaagaggcacggaacggttgtcaaggtgaagcgcgccgagaaggtgcagaagaagttcctcggcaggccgatagaggtctggaagctctacttcaaccatcctcaggacgtcccggcgattcgagacaggatacgcgcccaccccgctgtcgttgacatctacgagtacgacatacccttcgccaagcgctacctcatcgacaagggcctgattccgatggagggcgacgaggagcttacgatgctcgccttcgcgatcgcaaccctctatcacgagggcgaggagttcggaaccgggccgattctcatgataagctacgccgacgggagcgaggcgagggtgataacctggaagaagattgaccttccgtacgttgacgtcgtctcgaccgagaaggagatgattaagcgcttcctccgcgtcgtcagggagaaggaccccgacgtgctcatcacctacaacggcgacaacttcgacttcgcctacctgaagaagcgctgtgaggaactcggaataaagttcacactcggcagggacgggagcgagccgaagatacagcgaatgggcgaccgctttgccgttgaggtgaagggcaggattcacttcgacctctaccccgtcataaggcgcacgataaacctcccgacctacacccttgaggccgtttacgaggccgtctttggaaagcccaaggagaaggtttacgcagaggagatagcgcaggcctgggagagcggggagggccttgaaagggttgcaagatactcgatggaggacgctaaggtgacctacgagctgggaagggagttcttcccgatggaggcccagctttcgaggcttataggccagagcctctgggacgtctcgcgctcgagcaccggaaatttggtggagtggttcctcctgcggaaggcctacaagaggaacgagctcgccccaaacaagcccgacgagagggagctcgcgagacggcgcgggggctacgctggcgggtacgttaaggaaccagagcggggattgtgggacaacattgtgtatttagacttccgctcgctgtatccttcaatcatcataacccacaacgtctcgccggataccctcaaccgcgagggctgtaaagagtacgacgtcgcccctgaggttggacacaagttctgcaaggacttccccggcttcataccaagcctcagaggagatttgctcgaggagaggcagaagataaagcggaagatgaaggcaacggttgacccgctggagaagaaactcctcgtgtacaggcagtggcttataaaaatcctcgccaacagcttctacggctactacggctacgccaaggcccggtggtactgcaaggagtgcgccgagagcgttacggcctggggaagggagtatatagaaatggttatccgggaactcgaagaaaaattcggttttaaagttctctatgccgatacagacggtctccatgctaccattcccggagcagacgctgaaacagtcaagaaaaaagcaaaggagttcttaaaatacattaatccaaaactgcccggcctgctcgaacttgagtacgagggcttctacgtgaggggcttcttcgtcacgaagaagaagtacgctgtgatagacgaggagggcaagataaccacgaggggtcttgagattgtgaggcgcgactggagcgagatagcgaaggagacccaggccagggtcttagaggcgatactcaagcacggtgacgtcgaggaggccgttaggatagtcaaggaagtgacggaaaagctgagcaagtatgaggtcccgcccgagaagctggtaatccacgagcagataacgcgcgatttgagggattacaaagccaccggcccgcacgttgccgttgcgaagaggctcgcggcgcgtggagtgaaaatccggcccggcacggtgataagctacatcgtcctaaagggctctggaaggataggcgacagggcgattccagctgatgagttcgacccgacgaagcaccgctacgatgcggaatactacatcgagaaccaggttctcccggcggtggagaggattctaaaagccttcggctatcggaaggaggatttgcgctaccagaagacgaagcaggtcggctcgggcgcgtggctgaaggtgaaggggaagaagggtaccgaagcttacgtagaacaaaaactcatctcagaagaggatctgaatagcgccgtcgaccatcatcatcatcatcattga

SEQ ID NO: 264 - protein, 802 aa, Artificial Sequence
  Description of Artificial Sequence:Thermococcus species 9degreesN-7 mutant DNA polymerase, 9degreesN mutant
MILDTDYITENGKPVIRVFKKENGEFKIEYDRTFEPYFYALLKDDSAIEDVKKVTAKRHGTVVKVKRAEKVQKKFLGRPIEVWKLYFNHPQDVPAIRDRIRAHPAVVDIYEYDIPFAKRYLIDKGLIPMEGDEELTMLAFAIATLYHEGEEFGTGPILMISYADGSEARVITWKKIDLPYVDVVSTEKEMIKRFLRVVREKDPDVLITYNGDNFDFAYLKKRCEELGIKFTLGRDGSEPKIQRMGDRFAVEVKGRIHFDLYPVIRRTINLPTYTLEAVYEAVFGKPKEKVYAEEIAQAWESGEGLERVARYSMEDAKVTYELGREFFPMEAQLSRLIGQSLWDVSRSSTGNLVEWFLLRKAYKRNELAPNKPDERELARRRGGYAGGYVKEPERGLWDNIVYLDFRSLYPSIIITHNVSPDTLNREGCKEYDVAPEVGHKFCKDFPGFIPSLRGDLLEERQKIKRKMKATVDPLEKKLLVYRQWLIKILANSFYGYYGYAKARWYCKECAESVTAWGREYIEMVIRELEEKFGFKVLYADTDGLHATIPGADAETVKKKAKEFLKYINPKLPGLLELEYEGFYVRGFFVTKKKYAVIDEEGKITTRGLEIVRRDWSEIAKETQARVLEAILKHGDVEEAVRIVKEVTEKLSKYEVPPEKLVIHEQITRDLRDYKATGPHVAVAKRLAARGVKIRPGTVISYIVLKGSGRIGDRAIPADEFDPTKHRYDAEYYIENQVLPAVERILKAFGYRKEDLRYQKTKQVGSGAWLKVKGKKGTEAYVEQKLISEEDLNSAVDHHHHHH

SEQ ID NO: 265 - DNA, 2409 bp, Artificial Sequence
  Description of Artificial Sequence:Thermococcus species 9degreesN-7 mutant DNA polymerase, 9degreesN mutant
atgattctcgataccgactacatcaccgagaacgggaagcccgtgataagggtcttcaagaaggagaacggcgagtttaaaatcgagtacgacagaaccttcgagccctacttctacgcccttctgaaggacgattctgcgatagaggacgtcaagaaggtaaccgcaaagaggcacggaacggttgtcaaggtgaagcgcgccgagaaggtgcagaagaagttcctcggcaggccgatagaggtctggaagctctacttcaaccatcctcaggacgtcccggcgattcgagacaggatacgcgcccaccccgctgtcgttgacatctacgagtacgacatacccttcgccaagcgctacctcatcgacaagggcctgattccgatggagggcgacgaggagcttacgatgctcgccttcgcgatcgcaaccctctatcacgagggcgaggagttcggaaccgggccgattctcatgataagctacgccgacgggagcgaggcgagggtgataacctggaagaagattgaccttccgtacgttgacgtcgtctcgaccgagaaggagatgattaagcgcttcctccgcgtcgtcagggagaaggaccccgacgtgctcatcacctacaacggcgacaacttcgacttcgcctacctgaagaagcgctgtgaggaactcggaataaagttcacactcggcagggacgggagcgagccgaagatacagcgaatgggcgaccgctttgccgttgaggtgaagggcaggattcacttcgacctctaccccgtcataaggcgcacgataaacctcccgacctacacccttgaggccgtttacgaggccgtctttggaaagcccaaggagaaggtttacgcagaggagatagcgcaggcctgggagagcggggagggccttgaaagggttgcaagatactcgatggaggacgctaaggtgacctacgagctgggaagggagttcttcccgatggaggcccagctttcgaggcttataggccagagcctctgggacgtctcgcgctcgagcaccggaaatttggtggagtggttcctcctgcggaaggcctacaagaggaacgagctcgccccaaacaagcccgacgagagggagctcgcgagacggcgcgggggctacgctggcgggtacgttaaggaaccagagcggggattgtgggacaacattgtgtatttagacttccgctcgctgtatccttcaatcatcataacccacaacgtctcgccggataccctcaaccgcgagggctgtaaagagtacgacgtcgcccctgaggttggacacaagttctgcaaggacttccccggcttcataccaagcctccatggagatttgctcgaggagaggcagaagataaagcggaagatgaaggcaacggttgacccgctggagaagaaactcctcgtgtacaggcagtggcttataaaaatcctcgccaacagcttctacggctactacggctacgccaaggcccggtggtactgcaaggagtgcgccgagagcgttacggcctggggaagggagtatatagaaatggttatccgggaactcgaagaaaaattcggttttaaagttctctatgccgatacagacggtctccatgctaccattcccggagcagacgctgaaacagtcaagaaaaaagcaaaggagttcttaaaatacattaatccaaaactgcccggcctgctcgaacttgagtacgagggcttctacgtgaggggcttcttcgtcacgaagaagaagtacgctgtgatagacgaggagggcaagataaccacgaggggtcttgagattgtgaggcgcgactggagcgagatagcgaaggagacccaggccagggtcttagaggcgatactcaagcacggtgacgtcgaggaggccgttaggatagtcaaggaagtgacggaaaagctgagcaagtatgaggtcccgcccgagaagctggtaatccacgagcagataacgcgcgatttgagggattacaaagccaccggcccgcacgttgccgttgcgaagaggctcgcggcgcgtggagtgaaaatccggcccggcacggtgataagctacatcgtcctaaagggctctggaaggataggcgacagggcgattccagctgatgagttcgacccgacgaagcaccgctacgatgcggaatactacatcgagaaccaggttctcccggcggtggagaggattctaaaagccttcggctatcggaaggaggatttgcgctaccagaagacgaagcaggtcggctcgggcgcgtggctgaaggtgaaggggaagaagggtaccgaagcttacgtagaacaaaaactcatctcagaagaggatctgaatagcgccgtcgaccatcatcatcatcatcattga

SEQ ID NO: 266 - protein, 802 aa, Artificial Sequence
  Description of Artificial Sequence:Thermococcus species 9degreesN-7 mutant DNA polymerase, 9degreesN mutant
MILDTDYITENGKPVIRVFKKENGEFKIEYDRTFEPYFYALLKDDSAIEDVKKVTAKRHGTVVKVKRAEKVQKKFLGRPIEVWKLYFNHPQDVPAIRDRIRAHPAVVDIYEYDIPFAKRYLIDKGLIPMEGDEELTMLAFAIATLYHEGEEFGTGPILMISYADGSEARVITWKKIDLPYVDVVSTEKEMIKRFLRVVREKDPDVLITYNGDNFDFAYLKKRCEELGIKFTLGRDGSEPKIQRMGDRFAVEVKGRIHFDLYPVIRRTINLPTYTLEAVYEAVFGKPKEKVYAEEIAQAWESGEGLERVARYSMEDAKVTYELGREFFPMEAQLSRLIGQSLWDVSRSSTGNLVEWFLLRKAYKRNELAPNKPDERELARRRGGYAGGYVKEPERGLWDNIVYLDFRSLYPSIIITHNVSPDTLNREGCKEYDVAPEVGHKFCKDFPGFIPSLHGDLLEERQKIKRKMKATVDPLEKKLLVYRQWLIKILANSFYGYYGYAKARWYCKECAESVTAWGREYIEMVIRELEEKFGFKVLYADTDGLHATIPGADAETVKKKAKEFLKYINPKLPGLLELEYEGFYVRGFFVTKKKYAVIDEEGKITTRGLEIVRRDWSEIAKETQARVLEAILKHGDVEEAVRIVKEVTEKLSKYEVPPEKLVIHEQITRDLRDYKATGPHVAVAKRLAARGVKIRPGTVISYIVLKGSGRIGDRAIPADEFDPTKHRYDAEYYIENQVLPAVERILKAFGYRKEDLRYQKTKQVGSGAWLKVKGKKGTEAYVEQKLISEEDLNSAVDHHHHHH

SEQ ID NO: 267 - DNA, 2409 bp, Artificial Sequence
  Description of Artificial Sequence:Thermococcus species 9degreesN-7 mutant DNA polymerase, 9degreesN mutant
atgattctcgataccgactacatcaccgagaacgggaagcccgtgataagggtcttcaagaaggagaacggcgagtttaaaatcgagtacgacagaaccttcgagccctacttctacgcccttctgaaggacgattctgcgatagaggacgtcaagaaggtaaccgcaaagaggcacggaacggttgtcaaggtgaagcgcgccgagaaggtgcagaagaagttcctcggcaggccgatagaggtctggaagctctacttcaaccatcctcaggacgtcccggcgattcgagacaggatacgcgcccaccccgctgtcgttgacatctacgagtacgacatacccttcgccaagcgctacctcatcgacaagggcctgattccgatggagggcgacgaggagcttacgatgctcgccttcgcgatcgcaaccctctatcacgagggcgaggagttcggaaccgggccgattctcatgataagctacgccgacgggagcgaggcgagggtgataacctggaagaagattgaccttccgtacgttgacgtcgtctcgaccgagaaggagatgattaagcgcttcctccgcgtcgtcagggagaaggaccccgacgtgctcatcacctacaacggcgacaacttcgacttcgcctacctgaagaagcgctgtgaggaactcggaataaagttcacactcggcagggacgggagcgagccgaagatacagcgaatgggcgaccgctttgccgttgaggtgaagggcaggattcacttcgacctctaccccgtcataaggcgcacgataaacctcccgacctacacccttgaggccgtttacgaggccgtctttggaaagcccaaggagaaggtttacgcagaggagatagcgcaggcctgggagagcggggagggccttgaaagggttgcaagatactcgatggaggacgctaaggtgacctacgagctgggaagggagttcttcccggaggaggcccagctttcgaggcttataggccagagcctctgggacgtctcgcgctcgagcaccggaaatttggtggagtggttcctcctgcggaaggcctacaagaggaacgagctcgccccaaacaagcccgacgagagggagctcgcgagacggcgcgggggctacgctggcgggtacgttaaggaaccagagcggggattgtgggacaacattgtgtatttagacttccgctcgctgtatccttcaatcatcataacccacaacgtctcgccggataccctcaaccgcgagggctgtaaagagtacgacgtcgcccctgaggttggacacaagttctgcaaggacttccccggcttcataccaagcctcctgggagatttgctcgaggagaggcagaagataaagcggaagatgaaggcaacggttgacccgctggagaagaaactcctcgtgtacaggcagtggcttataaaaatcctcgccaacagcttctacggctactacggctacgccaaggcccggtggtactgcaaggagtgcgccgagagcgttacggcctggggaagggagtatatagaaatggttatccgggaactcgaagaaaaattcggttttaaagttctctatgccgatacagacggtctccatgctaccattcccggagcagacgctgaaacagtcaagaaaaaagcaaaggagttcttaaaatacattaatccaaaactgcccggcctgctcgaacttgagtacgagggcttctacgtgaggggcttcttcgtcacgaagaagaagtacgctgtgatagacgaggagggcaagataaccacgaggggtcttgagattgtgaggcgcgactggagcgagatagcgaaggagacccaggccagggtcttagaggcgatactcaagcacggtgacgtcgaggaggccgttaggatagtcaaggaagtgacggaaaagctgagcaagtatgaggtcccgcccgagaagctggtaatccacgagcagataacgcgcgatttgagggattacaaagccaccggcccgcacgttgccgttgcgaagaggctcgcggcgcgtggagtgaaaatccggcccggcacggtgataagctacatcgtcctaaagggctctggaaggataggcgacagggcgattccagctgatgagttcgacccgacgaagcaccgctacgatgcggaatactacatcgagaaccaggttctcccggcggtggagaggattctaaaagccttcggctatcggaaggaggatttgcgctaccagaagacgaagcaggtcggctcgggcgcgtggctgaaggtgaaggggaagaagggtaccgaagcttacgtagaacaaaaactcatctcagaagaggatctgaatagcgccgtcgaccatcatcatcatcatcattga

SEQ ID NO: 268 - protein, 802 aa, Artificial Sequence
  Description of Artificial Sequence:Thermococcus species 9degreesN-7 mutant DNA polymerase, 9degreesN mutant
MILDTDYITENGKPVIRVFKKENGEFKIEYDRTFEPYFYALLKDDSAIEDVKKVTAKRHGTVVKVKRAEKVQKKFLGRPIEVWKLYFNHPQDVPAIRDRIRAHPAVVDIYEYDIPFAKRYLIDKGLIPMEGDEELTMLAFAIATLYHEGEEFGTGPILMISYADGSEARVITWKKIDLPYVDVVSTEKEMIKRFLRVVREKDPDVLITYNGDNFDFAYLKKRCEELGIKFTLGRDGSEPKIQRMGDRFAVEVKGRIHFDLYPVIRRTINLPTYTLEAVYEAVFGKPKEKVYAEEIAQAWESGEGLERVARYSMEDAKVTYELGREFFPEEAQLSRLIGQSLWDVSRSSTGNLVEWFLLRKAYKRNELAPNKPDERELARRRGGYAGGYVKEPERGLWDNIVYLDFRSLYPSIIITHNVSPDTLNREGCKEYDVAPEVGHKFCKDFPGFIPSLLGDLLEERQKIKRKMKATVDPLEKKLLVYRQWLIKILANSFYGYYGYAKARWYCKECAESVTAWGREYIEMVIRELEEKFGFKVLYADTDGLHATIPGADAETVKKKAKEFLKYINPKLPGLLELEYEGFYVRGFFVTKKKYAVIDEEGKITTRGLEIVRRDWSEIAKETQARVLEAILKHGDVEEAVRIVKEVTEKLSKYEVPPEKLVIHEQITRDLRDYKATGPHVAVAKRLAARGVKIRPGTVISYIVLKGSGRIGDRAIPADEFDPTKHRYDAEYYIENQVLPAVERILKAFGYRKEDLRYQKTKQVGSGAWLKVKGKKGTEAYVEQKLISEEDLNSAVDHHHHHH

SEQ ID NO: 269 - DNA, 2409 bp, Artificial Sequence
  Description of Artificial Sequence:Thermococcus species 9degreesN-7 mutant DNA polymerase, 9degreesN mutant
atgattctcgataccgactacatcaccgagaacgggaagcccgtgataagggtcttcaagaaggagaacggcgagtttaaaatcgagtacgacagaaccttcgagccctacttctacgcccttctgaaggacgattctgcgatagaggacgtcaagaaggtaaccgcaaagaggcacggaacggttgtcaaggtgaagcgcgccgagaaggtgcagaagaagttcctcggcaggccgatagaggtctggaagctctacttcaaccatcctcaggacgtcccggcgattcgagacaggatacgcgcccaccccgctgtcgttgacatctacgagtacgacatacccttcgccaagcgctacctcatcgacaagggcctgattccgatggagggcgacgaggagcttacgatgctcgccttcgcgatcgcaaccctctatcacgagggcgaggagttcggaaccgggccgattctcatgataagctacgccgacgggagcgaggcgagggtgataacctggaagaagattgaccttccgtacgttgacgtcgtctcgaccgagaaggagatgattaagcgcttcctccgcgtcgtcagggagaaggaccccgacgtgctcatcacctacaacggcgacaacttcgacttcgcctacctgaagaagcgctgtgaggaactcggaataaagttcacactcggcagggacgggagcgagccgaagatacagcgaatgggcgaccgctttgccgttgaggtgaagggcaggattcacttcgacctctaccccgtcataaggcgcacgataaacctcccgacctacacccttgaggccgtttacgaggccgtctttggaaagcccaaggagaaggtttacgcagaggagatagcgcaggcctgggagagcggggagggccttgaaagggttgcaagatactcgatggaggacgctaaggtgacctacgagctgggaagggagttcttcccgtcagaggcccagctttcgaggcttataggccagagcctctgggacgtctcgcgctcgagcaccggaaatttggtggagtggttcctcctgcggaaggcctacaagaggaacgagctcgccccaaacaagcccgacgagagggagctcgcgagacggcgcgggggctacgctggcgggtacgttaaggaaccagagcggggattgtgggacaacattgtgtatttagacttccgctcgctgtatccttcaatcatcataacccacaacgtctcgccggataccctcaaccgcgagggctgtaaagagtacgacgtcgcccctgaggttggacacaagttctgcaaggacttccccggcttcataccaagcctcctgggagatttgctcgaggagaggcagaagataaagcggaagatgaaggcaacggttgacccgctggagaagaaactcctcgtgtacaggcagtggcttataaaaatcctcgccaacagcttctacggctactacggctacgccaaggcccggtggtactgcaaggagtgcgccgagagcgttacggcctggggaagggagtatatagaaatggttatccgggaactcgaagaaaaattcggttttaaagttctctatgccgatacagacggtctccatgctaccattcccggagcagacgctgaaacagtcaagaaaaaagcaaaggagttcttaaaatacattaatccaaaactgcccggcctgctcgaacttgagtacgagggcttctacgtgaggggcttcttcgtcacgaagaagaagtacgctgtgatagacgaggagggcaagataaccacgaggggtcttgagattgtgaggcgcgactggagcgagatagcgaaggagacccaggccagggtcttagaggcgatactcaagcacggtgacgtcgaggaggccgttaggatagtcaaggaagtgacggaaaagctgagcaagtatgaggtcccgcccgagaagctggtaatccacgagcagataacgcgcgatttgagggattacaaagccaccggcccgcacgttgccgttgcgaagaggctcgcggcgcgtggagtgaaaatccggcccggcacggtgataagctacatcgtcctaaagggctctggaaggataggcgacagggcgattccagctgatgagttcgacccgacgaagcaccgctacgatgcggaatactacatcgagaaccaggttctcccggcggtggagaggattctaaaagccttcggctatcggaaggaggatttgcgctaccagaagacgaagcaggtcggctcgggcgcgtggctgaaggtgaaggggaagaagggtaccgaagcttacgtagaacaaaaactcatctcagaagaggatctgaatagcgccgtcgaccatcatcatcatcatcattga

SEQ ID NO: 270 - protein, 802 aa, Artificial Sequence
  Description of Artificial Sequence:Thermococcus species 9degreesN-7 mutant DNA polymerase, 9degreesN mutant
MILDTDYITENGKPVIRVFKKENGEFKIEYDRTFEPYFYALLKDDSAIEDVKKVTAKRHGTVVKVKRAEKVQKKFLGRPIEVWKLYFNHPQDVPAIRDRIRAHPAVVDIYEYDIPFAKRYLIDKGLIPMEGDEELTMLAFAIATLYHEGEEFGTGPILMISYADGSEARVITWKKIDLPYVDVVSTEKEMIKRFLRVVREKDPDVLITYNGDNFDFAYLKKRCEELGIKFTLGRDGSEPKIQRMGDRFAVEVKGRIHFDLYPVIRRTINLPTYTLEAVYEAVFGKPKEKVYAEEIAQAWESGEGLERVARYSMEDAKVTYELGREFFPSEAQLSRLIGQSLWDVSRSSTGNLVEWFLLRKAYKRNELAPNKPDERELARRRGGYAGGYVKEPERGLWDNIVYLDFRSLYPSIIITHNVSPDTLNREGCKEYDVAPEVGHKFCKDFPGFIPSLLGDLLEERQKIKRKMKATVDPLEKKLLVYRQWLIKILANSFYGYYGYAKARWYCKECAESVTAWGREYIEMVIRELEEKFGFKVLYADTDGLHATIPGADAETVKKKAKEFLKYINPKLPGLLELEYEGFYVRGFFVTKKKYAVIDEEGKITTRGLEIVRRDWSEIAKETQARVLEAILKHGDVEEAVRIVKEVTEKLSKYEVPPEKLVIHEQITRDLRDYKATGPHVAVAKRLAARGVKIRPGTVISYIVLKGSGRIGDRAIPADEFDPTKHRYDAEYYIENQVLPAVERILKAFGYRKEDLRYQKTKQVGSGAWLKVKGKKGTEAYVEQKLISEEDLNSAVDHHHHHH

SEQ ID NO: 271 - DNA, 2409 bp, Artificial Sequence
  Description of Artificial Sequence:Thermococcus species 9degreesN-7 mutant DNA polymerase, 9degreesN mutant
atgattctcgataccgactacatcaccgagaacgggaagcccgtgataagggtcttcaagaaggagaacggcgagtttaaaatcgagtacgacagaaccttcgagccctacttctacgcccttctgaaggacgattctgcgatagaggacgtcaagaaggtaaccgcaaagaggcacggaacggttgtcaaggtgaagcgcgccgagaaggtgcagaagaagttcctcggcaggccgatagaggtctggaagctctacttcaaccatcctcaggacgtcccggcgattcgagacaggatacgcgcccaccccgctgtcgttgacatctacgagtacgacatacccttcgccaagcgctacctcatcgacaagggcctgattccgatggagggcgacgaggagcttacgatgctcgccttcgcgatcgcaaccctctatcacgagggcgaggagttcggaaccgggccgattctcatgataagctacgccgacgggagcgaggcgagggtgataacctggaagaagattgaccttccgtacgttgacgtcgtctcgaccgagaaggagatgattaagcgcttcctccgcgtcgtcagggagaaggaccccgacgtgctcatcacctacaacggcgacaacttcgacttcgcctacctgaagaagcgctgtgaggaactcggaataaagttcacactcggcagggacgggagcgagccgaagatacagcgaatgggcgaccgctttgccgttgaggtgaagggcaggattcacttcgacctctaccccgtcataaggcgcacgataaacctcccgacctacacccttgaggccgtttacgaggccgtctttggaaagcccaaggagaaggtttacgcagaggagatagcgcaggcctgggagagcggggagggccttgaaagggttgcaagatactcgatggaggacgctaaggtgacctacgagctgggaagggagttcttcccgatggaggcccagctttcgaggcttataggccagagcctctgggacgtctcgcgctcgagcaccggaaatttggtggagtggttcctcctgcggaaggcctacaagaggaacgagctcgccccaaacaagcccgacgagagggagctcgcgagacggcgcgggggctacgctggcgggtacgttaaggaaccagagcggggattgtgggacaacattgtgtatttagacttccgctcgctgtatccttcaatcatcataacccacaacgtctcgccggataccctcaaccgcgagggctgtaaagagtacgacgtcgcccctgaggttggacacaagttctgcaaggacttccccggcttcatacttagcctcctgggagatttgctcgaggagaggcagaagataaagcggaagatgaaggcaacggttgacccgctggagaagaaactcctcgtgtacaggcagtggcttataaaaatcctcgccaacagcttctacggctactacggctacgccaaggcccggtggtactgcaaggagtgcgccgagagcgttacggcctggggaagggagtatatagaaatggttatccgggaactcgaagaaaaattcggttttaaagttctctatgccgatacagacggtctccatgctaccattcccggagcagacgctgaaacagtcaagaaaaaagcaaaggagttcttaaaatacattaatccaaaactgcccggcctgctcgaacttgagtacgagggcttctacgtgaggggcttcttcgtcacgaagaagaagtacgctgtgatagacgaggagggcaagataaccacgaggggtcttgagattgtgaggcgcgactggagcgagatagcgaaggagacccaggccagggtcttagaggcgatactcaagcacggtgacgtcgaggaggccgttaggatagtcaaggaagtgacggaaaagctgagcaagtatgaggtcccgcccgagaagctggtaatccacgagcagataacgcgcgatttgagggattacaaagccaccggcccgcacgttgccgttgcgaagaggctcgcggcgcgtggagtgaaaatccggcccggcacggtgataagctacatcgtcctaaagggctctggaaggataggcgacagggcgattccagctgatgagttcgacccgacgaagcaccgctacgatgcggaatactacatcgagaaccaggttctcccggcggtggagaggattctaaaagccttcggctatcggaaggaggatttgcgctaccagaagacgaagcaggtcggctcgggcgcgtggctgaaggtgaaggggaagaagggtaccgaagcttacgtagaacaaaaactcatctcagaagaggatctgaatagcgccgtcgaccatcatcatcatcatcattga

SEQ ID NO: 272 - protein, 802 aa, Artificial Sequence
  Description of Artificial Sequence:Thermococcus species 9degreesN-7 mutant DNA polymerase, 9degreesN mutant
MILDTDYITENGKPVIRVFKKENGEFKIEYDRTFEPYFYALLKDDSAIEDVKKVTAKRHGTVVKVKRAEKVQKKFLGRPIEVWKLYFNHPQDVPAIRDRIRAHPAVVDIYEYDIPFAKRYLIDKGLIPMEGDEELTMLAFAIATLYHEGEEFGTGPILMISYADGSEARVITWKKIDLPYVDVVSTEKEMIKRFLRVVREKDPDVLITYNGDNFDFAYLKKRCEELGIKFTLGRDGSEPKIQRMGDRFAVEVKGRIHFDLYPVIRRTINLPTYTLEAVYEAVFGKPKEKVYAEEIAQAWESGEGLERVARYSMEDAKVTYELGREFFPMEAQLSRLIGQSLWDVSRSSTGNLVEWFLLRKAYKRNELAPNKPDERELARRRGGYAGGYVKEPERGLWDNIVYLDFRSLYPSIIITHNVSPDTLNREGCKEYDVAPEVGHKFCKDFPGFILSLLGDLLEERQKIKRKMKATVDPLEKKLLVYRQWLIKILANSFYGYYGYAKARWYCKECAESVTAWGREYIEMVIRELEEKFGFKVLYADTDGLHATIPGADAETVKKKAKEFLKYINPKLPGLLELEYEGFYVRGFFVTKKKYAVIDEEGKITTRGLEIVRRDWSEIAKETQARVLEAILKHGDVEEAVRIVKEVTEKLSKYEVPPEKLVIHEQITRDLRDYKATGPHVAVAKRLAARGVKIRPGTVISYIVLKGSGRIGDRAIPADEFDPTKHRYDAEYYIENQVLPAVERILKAFGYRKEDLRYQKTKQVGSGAWLKVKGKKGTEAYVEQKLISEEDLNSAVDHHHHHH

SEQ ID NO: 273 - DNA, 2409 bp, Artificial Sequence
  Description of Artificial Sequence:Thermococcus species 9degreesN-7 mutant DNA polymerase, 9degreesN mutant
atgattctcgataccgactacatcaccgagaacgggaagcccgtgataagggtcttcaagaaggagaacggcgagtttaaaatcgagtacgacagaaccttcgagccctacttctacgcccttctgaaggacgattctgcgatagaggacgtcaagaaggtaaccgcaaagaggcacggaacggttgtcaaggtgaagcgcgccgagaaggtgcagaagaagttcctcggcaggccgatagaggtctggaagctctacttcaaccatcctcaggacgtcccggcgattcgagacaggatacgcgcccaccccgctgtcgttgacatctacgagtacgacatacccttcgccaagcgctacctcatcgacaagggcctgattccgatggagggcgacgaggagcttacgatgctcgccttcgcgatcgcaaccctctatcacgagggcgaggagttcggaaccgggccgattctcatgataagctacgccgacgggagcgaggcgagggtgataacctggaagaagattgaccttccgtacgttgacgtcgtctcgaccgagaaggagatgattaagcgcttcctccgcgtcgtcagggagaaggaccccgacgtgctcatcacctacaacggcgacaacttcgacttcgcctacctgaagaagcgctgtgaggaactcggaataaagttcacactcggcagggacgggagcgagccgaagatacagcgaatgggcgaccgctttgccgttgaggtgaagggcaggattcacttcgacctctaccccgtcataaggcgcacgataaacctcccgacctacacccttgaggccgtttacgaggccgtctttggaaagcccaaggagaaggtttacgcagaggagatagcgcaggcctgggagagcggggagggccttgaaagggttgcaagatactcgatggaggacgctaaggtgacctacgagctgggaagggagttcttcccgatggaggcccgcctttcgaggcttataggccagagcctctgggacgtctcgcgctcgagcaccggaaatttggtggagtggttcctcctgcggaaggcctacaagaggaacgagctcgccccaaacaagcccgacgagagggagctcgcgagacggcgcgggggctacgctggcgggtacgttaaggaaccagagcggggattgtgggacaacattgtgtatttagacttccgctcgctgtatccttcaatcatcataacccacaacgtctcgccggataccctcaaccgcgagggctgtaaagagtacgacgtcgcccctgaggttggacacaagttctgcaaggacttccccggcttcataccaagcctcctgggagatttgctcgaggagaggcagaagataaagcggaagatgaaggcaacggttgacccgctggagaagaaactcctcgtgtacaggcagtggcttataaaaatcctcgccaacagcttctacggctactacggctacgccaaggcccggtggtactgcaaggagtgcgccgagagcgttacggcctggggaagggagtatatagaaatggttatccgggaactcgaagaaaaattcggttttaaagttctctatgccgatacagacggtctccatgctaccattcccggagcagacgctgaaacagtcaagaaaaaagcaaaggagttcttaaaatacattaatccaaaactgcccggcctgctcgaacttgagtacgagggcttctacgtgaggggcttcttcgtcacgaagaagaagtacgctgtgatagacgaggagggcaagataaccacgaggggtcttgagattgtgaggcgcgactggagcgagatagcgaaggagacccaggccagggtcttagaggcgatactcaagcacggtgacgtcgaggaggccgttaggatagtcaaggaagtgacggaaaagctgagcaagtatgaggtcccgcccgagaagctggtaatccacgagcagataacgcgcgatttgagggattacaaagccaccggcccgcacgttgccgttgcgaagaggctcgcggcgcgtggagtgaaaatccggcccggcacggtgataagctacatcgtcctaaagggctctggaaggataggcgacagggcgattccagctgatgagttcgacccgacgaagcaccgctacgatgcggaatactacatcgagaaccaggttctcccggcggtggagaggattctaaaagccttcggctatcggaaggaggatttgcgctaccagaagacgaagcaggtcggctcgggcgcgtggctgaaggtgaaggggaagaagggtaccgaagcttacgtagaacaaaaactcatctcagaagaggatctgaatagcgccgtcgaccatcatcatcatcatcattga

SEQ ID NO: 274 - protein, 802 aa, Artificial Sequence
  Description of Artificial Sequence:Thermococcus species 9degreesN-7 mutant DNA polymerase, 9degreesN mutant
MILDTDYITENGKPVIRVFKKENGEFKIEYDRTFEPYFYALLKDDSAIEDVKKVTAKRHGTVVKVKRAEKVQKKFLGRPIEVWKLYFNHPQDVPAIRDRIRAHPAVVDIYEYDIPFAKRYLIDKGLIPMEGDEELTMLAFAIATLYHEGEEFGTGPILMISYADGSEARVITWKKIDLPYVDVVSTEKEMIKRFLRVVREKDPDVLITYNGDNFDFAYLKKRCEELGIKFTLGRDGSEPKIQRMGDRFAVEVKGRIHFDLYPVIRRTINLPTYTLEAVYEAVFGKPKEKVYAEEIAQAWESGEGLERVARYSMEDAKVTYELGREFFPMEARLSRLIGQSLWDVSRSSTGNLVEWFLLRKAYKRNELAPNKPDERELARRRGGYAGGYVKEPERGLWDNIVYLDFRSLYPSIIITHNVSPDTLNREGCKEYDVAPEVGHKFCKDFPGFIPSLLGDLLEERQKIKRKMKATVDPLEKKLLVYRQWLIKILANSFYGYYGYAKARWYCKECAESVTAWGREYIEMVIRELEEKFGFKVLYADTDGLHATIPGADAETVKKKAKEFLKYINPKLPGLLELEYEGFYVRGFFVTKKKYAVIDEEGKITTRGLEIVRRDWSEIAKETQARVLEAILKHGDVEEAVRIVKEVTEKLSKYEVPPEKLVIHEQITRDLRDYKATGPHVAVAKRLAARGVKIRPGTVISYIVLKGSGRIGDRAIPADEFDPTKHRYDAEYYIENQVLPAVERILKAFGYRKEDLRYQKTKQVGSGAWLKVKGKKGTEAYVEQKLISEEDLNSAVDHHHHHH

SEQ ID NO: 275 - DNA, 2409 bp, Artificial Sequence
  Description of Artificial Sequence:Thermococcus species 9degreesN-7 mutant DNA polymerase, 9degreesN mutant
atgattctcgataccgactacatcaccgagaacgggaagcccgtgataagggtcttcaagaaggagaacggcgagtttaaaatcgagtacgacagaaccttcgagccctacttctacgcccttctgaaggacgattctgcgatagaggacgtcaagaaggtaaccgcaaagaggcacggaacggttgtcaaggtgaagcgcgccgagaaggtgcagaagaagttcctcggcaggccgatagaggtctggaagctctacttcaaccatcctcaggacgtcccggcgattcgagacaggatacgcgcccaccccgctgtcgttgacatctacgagtacgacatacccttcgccaagcgctacctcatcgacaagggcctgattccgatggagggcgacgaggagcttacgatgctcgccttcgcgatcgcaaccctctatcacgagggcgaggagttcggaaccgggccgattctcatgataagctacgccgacgggagcgaggcgagggtgataacctggaagaagattgaccttccgtacgttgacgtcgtctcgaccgagaaggagatgattaagcgcttcctccgcgtcgtcagggagaaggaccccgacgtgctcatcacctacaacggcgacaacttcgacttcgcctacctgaagaagcgctgtgaggaactcggaataaagttcacactcggcagggacgggagcgagccgaagatacagcgaatgggcgaccgctttgccgttgaggtgaagggcaggattcacttcgacctctaccccgtcataaggcgcacgataaacctcccgacctacacccttgaggccgtttacgaggccgtctttggaaagcccaaggagaaggtttacgcagaggagatagcgcaggcctgggagagcggggagggccttgaaagggttgcaagatactcgatggaggacgctaaggtgacctacgagctgggaagggagttcttcccgatggaggcctggctttcgaggcttataggccagagcctctgggacgtctcgcgctcgagcaccggaaatttggtggagtggttcctcctgcggaaggcctacaagaggaacgagctcgccccaaacaagcccgacgagagggagctcgcgagacggcgcgggggctacgctggcgggtacgttaaggaaccagagcggggattgtgggacaacattgtgtatttagacttccgctcgctgtatccttcaatcatcataacccacaacgtctcgccggataccctcaaccgcgagggctgtaaagagtacgacgtcgcccctgaggttggacacaagttctgcaaggacttccccggcttcataccaagcctcctgggagatttgctcgaggagaggcagaagataaagcggaagatgaaggcaacggttgacccgctggagaagaaactcctcgtgtacaggcagtggcttataaaaatcctcgccaacagcttctacggctactacggctacgccaaggcccggtggtactgcaaggagtgcgccgagagcgttacggcctggggaagggagtatatagaaatggttatccgggaactcgaagaaaaattcggttttaaagttctctatgccgatacagacggtctccatgctaccattcccggagcagacgctgaaacagtcaagaaaaaagcaaaggagttcttaaaatacattaatccaaaactgcccggcctgctcgaacttgagtacgagggcttctacgtgaggggcttcttcgtcacgaagaagaagtacgctgtgatagacgaggagggcaagataaccacgaggggtcttgagattgtgaggcgcgactggagcgagatagcgaaggagacccaggccagggtcttagaggcgatactcaagcacggtgacgtcgaggaggccgttaggatagtcaaggaagtgacggaaaagctgagcaagtatgaggtcccgcccgagaagctggtaatccacgagcagataacgcgcgatttgagggattacaaagccaccggcccgcacgttgccgttgcgaagaggctcgcggcgcgtggagtgaaaatccggcccggcacggtgataagctacatcgtcctaaagggctctggaaggataggcgacagggcgattccagctgatgagttcgacccgacgaagcaccgctacgatgcggaatactacatcgagaaccaggttctcccggcggtggagaggattctaaaagccttcggctatcggaaggaggatttgcgctaccagaagacgaagcaggtcggctcgggcgcgtggctgaaggtgaaggggaagaagggtaccgaagcttacgtagaacaaaaactcatctcagaagaggatctgaatagcgccgtcgaccatcatcatcatcatcattga

SEQ ID NO: 276 - protein, 802 aa, Artificial Sequence
  Description of Artificial Sequence:Thermococcus species 9degreesN-7 mutant DNA polymerase, 9degreesN mutant
MILDTDYITENGKPVIRVFKKENGEFKIEYDRTFEPYFYALLKDDSAIEDVKKVTAKRHGTVVKVKRAEKVQKKFLGRPIEVWKLYFNHPQDVPAIRDRIRAHPAVVDIYEYDIPFAKRYLIDKGLIPMEGDEELTMLAFAIATLYHEGEEFGTGPILMISYADGSEARVITWKKIDLPYVDVVSTEKEMIKRFLRVVREKDPDVLITYNGDNFDFAYLKKRCEELGIKFTLGRDGSEPKIQRMGDRFAVEVKGRIHFDLYPVIRRTINLPTYTLEAVYEAVFGKPKEKVYAEEIAQAWESGEGLERVARYSMEDAKVTYELGREFFPMEAWLSRLIGQSLWDVSRSSTGNLVEWFLLRKAYKRNELAPNKPDERELARRRGGYAGGYVKEPERGLWDNIVYLDFRSLYPSIIITHNVSPDTLNREGCKEYDVAPEVGHKFCKDFPGFIPSLLGDLLEERQKIKRKMKATVDPLEKKLLVYRQWLIKILANSFYGYYGYAKARWYCKECAESVTAWGREYIEMVIRELEEKFGFKVLYADTDGLHATIPGADAETVKKKAKEFLKYINPKLPGLLELEYEGFYVRGFFVTKKKYAVIDEEGKITTRGLEIVRRDWSEIAKETQARVLEAILKHGDVEEAVRIVKEVTEKLSKYEVPPEKLVIHEQITRDLRDYKATGPHVAVAKRLAARGVKIRPGTVISYIVLKGSGRIGDRAIPADEFDPTKHRYDAEYYIENQVLPAVERILKAFGYRKEDLRYQKTKQVGSGAWLKVKGKKGTEAYVEQKLISEEDLNSAVDHHHHHH

SEQ ID NO: 277 - DNA, 2409 bp, Artificial Sequence
  Description of Artificial Sequence:Thermococcus species 9degreesN-7 mutant DNA polymerase, 9degreesN mutant
atgattctcgataccgactacatcaccgagaacgggaagcccgtgataagggtcttcaagaaggagaacggcgagtttaaaatcgagtacgacagaaccttcgagccctacttctacgcccttctgaaggacgattctgcgatagaggacgtcaagaaggtaaccgcaaagaggcacggaacggttgtcaaggtgaagcgcgccgagaaggtgcagaagaagttcctcggcaggccgatagaggtctggaagctctacttcaaccatcctcaggacgtcccggcgattcgagacaggatacgcgcccaccccgctgtcgttgacatctacgagtacgacatacccttcgccaagcgctacctcatcgacaagggcctgattccgatggagggcgacgaggagcttacgatgctcgccttcgcgatcgcaaccctctatcacgagggcgaggagttcggaaccgggccgattctcatgataagctacgccgacgggagcgaggcgagggtgataacctggaagaagattgaccttccgtacgttgacgtcgtctcgaccgagaaggagatgattaagcgcttcctccgcgtcgtcagggagaaggaccccgacgtgctcatcacctacaacggcgacaacttcgacttcgcctacctgaagaagcgctgtgaggaactcggaataaagttcacactcggcagggacgggagcgagccgaagatacagcgaatgggcgaccgctttgccgttgaggtgaagggcaggattcacttcgacctctaccccgtcataaggcgcacgataaacctcccgacctacacccttgaggccgtttacgaggccgtctttggaaagcccaaggagaaggtttacgcagaggagatagcgcaggcctgggagagcggggagggccttgaaagggttgcaagatactcgatggaggacgctaaggtgacctacgagctgggaagggagttcttcccgatggaggcccagctttcgaggcttataggccagagcctctgggacgtctcgcgctcgagcaccggaaatttggtggagtggttcctcctgcggaaggcctacaagaggaacgagctcgccccaaacaagcccgacgagagggagctcgcgagacggcgcgggggctacgctggcgggtacgttaaggaaccagagcggggattgtgggacaacattgtgtatttagacttccgctcgctgtatccttcaatcatcataacccacaacgtctcgccggataccctcaaccgcgagggctgtaaagagtacgacgtcgcccctgaggttggacacaagttctgcaaggacttccccggcttcataccaagcctcctgggagatttgctcgaggagaggcagaagataaagcggaagatgaaggcaacggttgacccgctggagaagaaactcctcgtgtacaggctctggcttataaaaatcctcgccaacagcttctacggctactacggctacgccaaggcccggtggtactgcaaggagtgcgccgagagcgttacggcctggggaagggagtatatagaaatggttatccgggaactcgaagaaaaattcggttttaaagttctctatgccgatacagacggtctccatgctaccattcccggagcagacgctgaaacagtcaagaaaaaagcaaaggagttcttaaaatacattaatccaaaactgcccggcctgctcgaacttgagtacgagggcttctacgtgaggggcttcttcgtcacgaagaagaagtacgctgtgatagacgaggagggcaagataaccacgaggggtcttgagattgtgaggcgcgactggagcgagatagcgaaggagacccaggccagggtcttagaggcgatactcaagcacggtgacgtcgaggaggccgttaggatagtcaaggaagtgacggaaaagctgagcaagtatgaggtcccgcccgagaagctggtaatccacgagcagataacgcgcgatttgagggattacaaagccaccggcccgcacgttgccgttgcgaagaggctcgcggcgcgtggagtgaaaatccggcccggcacggtgataagctacatcgtcctaaagggctctggaaggataggcgacagggcgattccagctgatgagttcgacccgacgaagcaccgctacgatgcggaatactacatcgagaaccaggttctcccggcggtggagaggattctaaaagccttcggctatcggaaggaggatttgcgctaccagaagacgaagcaggtcggctcgggcgcgtggctgaaggtgaaggggaagaagggtaccgaagcttacgtagaacaaaaactcatctcagaagaggatctgaatagcgccgtcgaccatcatcatcatcatcattga

SEQ ID NO: 278 - protein, 802 aa, Artificial Sequence
  Description of Artificial Sequence:Thermococcus species 9degreesN-7 mutant DNA polymerase, 9degreesN mutant
MILDTDYITENGKPVIRVFKKENGEFKIEYDRTFEPYFYALLKDDSAIEDVKKVTAKRHGTVVKVKRAEKVQKKFLGRPIEVWKLYFNHPQDVPAIRDRIRAHPAVVDIYEYDIPFAKRYLIDKGLIPMEGDEELTMLAFAIATLYHEGEEFGTGPILMISYADGSEARVITWKKIDLPYVDVVSTEKEMIKRFLRVVREKDPDVLITYNGDNFDFAYLKKRCEELGIKFTLGRDGSEPKIQRMGDRFAVEVKGRIHFDLYPVIRRTINLPTYTLEAVYEAVFGKPKEKVYAEEIAQAWESGEGLERVARYSMEDAKVTYELGREFFPMEAQLSRLIGQSLWDVSRSSTGNLVEWFLLRKAYKRNELAPNKPDERELARRRGGYAGGYVKEPERGLWDNIVYLDFRSLYPSIIITHNVSPDTLNREGCKEYDVAPEVGHKFCKDFPGFIPSLLGDLLEERQKIKRKMKATVDPLEKKLLVYRLWLIKILANSFYGYYGYAKARWYCKECAESVTAWGREYIEMVIRELEEKFGFKVLYADTDGLHATIPGADAETVKKKAKEFLKYINPKLPGLLELEYEGFYVRGFFVTKKKYAVIDEEGKITTRGLEIVRRDWSEIAKETQARVLEAILKHGDVEEAVRIVKEVTEKLSKYEVPPEKLVIHEQITRDLRDYKATGPHVAVAKRLAARGVKIRPGTVISYIVLKGSGRIGDRAIPADEFDPTKHRYDAEYYIENQVLPAVERILKAFGYRKEDLRYQKTKQVGSGAWLKVKGKKGTEAYVEQKLISEEDLNSAVDHHHHHH

SEQ ID NO: 279 - DNA, 2409 bp, Artificial Sequence
  Description of Artificial Sequence:Thermococcus species 9degreesN-7 mutant DNA polymerase, 9degreesN mutant
atgattctcgataccgactacatcaccgagaacgggaagcccgtgataagggtcttcaagaaggagaacggcgagtttaaaatcgagtacgacagaaccttcgagccctacttctacgcccttctgaaggacgattctgcgatagaggacgtcaagaaggtaaccgcaaagaggcacggaacggttgtcaaggtgaagcgcgccgagaaggtgcagaagaagttcctcggcaggccgatagaggtctggaagctctacttcaaccatcctcaggacgtcccggcgattcgagacaggatacgcgcccaccccgctgtcgttgacatctacgagtacgacatacccttcgccaagcgctacctcatcgacaagggcctgattccgatggagggcgacgaggagcttacgatgctcgccttcgcgatcgcaaccctctatcacgagggcgaggagttcggaaccgggccgattctcatgataagctacgccgacgggagcgaggcgagggtgataacctggaagaagattgaccttccgtacgttgacgtcgtctcgaccgagaaggagatgattaagcgcttcctccgcgtcgtcagggagaaggaccccgacgtgctcatcacctacaacggcgacaacttcgacttcgcctacctgaagaagcgctgtgaggaactcggaataaagttcacactcggcagggacgggagcgagccgaagatacagcgaatgggcgaccgctttgccgttgaggtgaagggcaggattcacttcgacctctaccccgtcataaggcgcacgataaacctcccgacctacacccttgaggccgtttacgaggccgtctttggaaagcccaaggagaaggtttacgcagaggagatagcgcaggcctgggagagcggggagggccttgaaagggttgcaagatactcgatggaggacgctaaggtgacctacgagctgggaagggagttcttcccgatggaggcccagctttcgaggcttataggccagagcctctgggacgtctcgcgctcgagcaccggaaatttggtggagtggttcctcctgcggaaggcctacaagaggaacgagctcgccccaaacaagcccgacgagagggagctcgcgagacggcgcgggggctacgctggcgggtacgttaaggaaccagagcggggattgtgggacaacattgtgtatttagacttccgctcgctgtatccttcaatcatcataacccacaacgtctcgccggataccctcaaccgcgagggctgtaaagagtacgacgtcgcccctgaggttggacacaagttctgcaaggacttccccggcttcataccaagcctcctgggagatttgctcgaggagaggcagaagataaagcggaagatgaaggcaacggttgacccgctggagaagaaactcctcgtgtacaggttctggcttataaaaatcctcgccaacagcttctacggctactacggctacgccaaggcccggtggtactgcaaggagtgcgccgagagcgttacggcctggggaagggagtatatagaaatggttatccgggaactcgaagaaaaattcggttttaaagttctctatgccgatacagacggtctccatgctaccattcccggagcagacgctgaaacagtcaagaaaaaagcaaaggagttcttaaaatacattaatccaaaactgcccggcctgctcgaacttgagtacgagggcttctacgtgaggggcttcttcgtcacgaagaagaagtacgctgtgatagacgaggagggcaagataaccacgaggggtcttgagattgtgaggcgcgactggagcgagatagcgaaggagacccaggccagggtcttagaggcgatactcaagcacggtgacgtcgaggaggccgttaggatagtcaaggaagtgacggaaaagctgagcaagtatgaggtcccgcccgagaagctggtaatccacgagcagataacgcgcgatttgagggattacaaagccaccggcccgcacgttgccgttgcgaagaggctcgcggcgcgtggagtgaaaatccggcccggcacggtgataagctacatcgtcctaaagggctctggaaggataggcgacagggcgattccagctgatgagttcgacccgacgaagcaccgctacgatgcggaatactacatcgagaaccaggttctcccggcggtggagaggattctaaaagccttcggctatcggaaggaggatttgcgctaccagaagacgaagcaggtcggctcgggcgcgtggctgaaggtgaaggggaagaagggtaccgaagcttacgtagaacaaaaactcatctcagaagaggatctgaatagcgccgtcgaccatcatcatcatcatcattga

SEQ ID NO: 280 - protein, 802 aa, Artificial Sequence
  Description of Artificial Sequence:Thermococcus species 9degreesN-7 mutant DNA polymerase, 9degreesN mutant
MILDTDYITENGKPVIRVFKKENGEFKIEYDRTFEPYFYALLKDDSAIEDVKKVTAKRHGTVVKVKRAEKVQKKFLGRPIEVWKLYFNHPQDVPAIRDRIRAHPAVVDIYEYDIPFAKRYLIDKGLIPMEGDEELTMLAFAIATLYHEGEEFGTGPILMISYADGSEARVITWKKIDLPYVDVVSTEKEMIKRFLRVVREKDPDVLITYNGDNFDFAYLKKRCEELGIKFTLGRDGSEPKIQRMGDRFAVEVKGRIHFDLYPVIRRTINLPTYTLEAVYEAVFGKPKEKVYAEEIAQAWESGEGLERVARYSMEDAKVTYELGREFFPMEAQLSRLIGQSLWDVSRSSTGNLVEWFLLRKAYKRNELAPNKPDERELARRRGGYAGGYVKEPERGLWDNIVYLDFRSLYPSIIITHNVSPDTLNREGCKEYDVAPEVGHKFCKDFPGFIPSLLGDLLEERQKIKRKMKATVDPLEKKLLVYRFWLIKILANSFYGYYGYAKARWYCKECAESVTAWGREYIEMVIRELEEKFGFKVLYADTDGLHATIPGADAETVKKKAKEFLKYINPKLPGLLELEYEGFYVRGFFVTKKKYAVIDEEGKITTRGLEIVRRDWSEIAKETQARVLEAILKHGDVEEAVRIVKEVTEKLSKYEVPPEKLVIHEQITRDLRDYKATGPHVAVAKRLAARGVKIRPGTVISYIVLKGSGRIGDRAIPADEFDPTKHRYDAEYYIENQVLPAVERILKAFGYRKEDLRYQKTKQVGSGAWLKVKGKKGTEAYVEQKLISEEDLNSAVDHHHHHH

SEQ ID NO: 281 - DNA, 2409 bp, Artificial Sequence
  Description of Artificial Sequence:Thermococcus species 9degreesN-7 mutant DNA polymerase, 9degreesN mutant
atgattctcgataccgactacatcaccgagaacgggaagcccgtgataagggtcttcaagaaggagaacggcgagtttaaaatcgagtacgacagaaccttcgagccctacttctacgcccttctgaaggacgattctgcgatagaggacgtcaagaaggtaaccgcaaagaggcacggaacggttgtcaaggtgaagcgcgccgagaaggtgcagaagaagttcctcggcaggccgatagaggtctggaagctctacttcaaccatcctcaggacgtcccggcgattcgagacaggatacgcgcccaccccgctgtcgttgacatctacgagtacgacatacccttcgccaagcgctacctcatcgacaagggcctgattccgatggagggcgacgaggagcttacgatgctcgccttcgcgatcgcaaccctctatcacgagggcgaggagttcggaaccgggccgattctcatgataagctacgccgacgggagcgaggcgagggtgataacctggaagaagattgaccttccgtacgttgacgtcgtctcgaccgagaaggagatgattaagcgcttcctccgcgtcgtcagggagaaggaccccgacgtgctcatcacctacaacggcgacaacttcgacttcgcctacctgaagaagcgctgtgaggaactcggaataaagttcacactcggcagggacgggagcgagccgaagatacagcgaatgggcgaccgctttgccgttgaggtgaagggcaggattcacttcgacctctaccccgtcataaggcgcacgataaacctcccgacctacacccttgaggccgtttacgaggccgtctttggaaagcccaaggagaaggtttacgcagaggagatagcgcaggcctgggagagcggggagggccttgaaagggttgcaagatactcgatggaggacgctaaggtgacctacgagctgggaagggagttcttcccgatggaggcccagctttcgaggcttataggccagagcctctgggacgtctcgcgctcgagcaccggaaatttggtggagtggttcctcctgcggaaggcctacaagaggaacgagctcgccccaaacaagcccgacgagagggagctcgcgagacggcgcgggggctacgctggcgggtacgttaaggaaccagagcggggattgtgggacaacattgtgtatttagacttccgcgcgctgtatccttcaatcatcataacccacaacgtctcgccggataccctcaaccgcgagggctgtaaagagtacgacgtcgcccctgaggttggacacaagttctgcaaggacttccccggcttcataccaagcctcctgggagatttgctcgaggagaggcagaagataaagcggaagatgaaggcaacggttgacccgctggagaagaaactcctcgtgtacaggcagtggcttataaaaatcctcgccaacagcttctacggctactacggctacgccaaggcccggtggtactgcaaggagtgcgccgagagcgttacggcctggggaagggagtatatagaaatggttatccgggaactcgaagaaaaattcggttttaaagttctctatgccgatacagacggtctccatgctaccattcccggagcagacgctgaaacagtcaagaaaaaagcaaaggagttcttaaaatacattaatccaaaactgcccggcctgctcgaacttgagtacgagggcttctacgtgaggggcttcttcgtcacgaagaagaagtacgctgtgatagacgaggagggcaagataaccacgaggggtcttgagattgtgaggcgcgactggagcgagatagcgaaggagacccaggccagggtcttagaggcgatactcaagcacggtgacgtcgaggaggccgttaggatagtcaaggaagtgacggaaaagctgagcaagtatgaggtcccgcccgagaagctggtaatccacgagcagataacgcgcgatttgagggattacaaagccaccggcccgcacgttgccgttgcgaagaggctcgcggcgcgtggagtgaaaatccggcccggcacggtgataagctacatcgtcctaaagggctctggaaggataggcgacagggcgattccagctgatgagttcgacccgacgaagcaccgctacgatgcggaatactacatcgagaaccaggttctcccggcggtggagaggattctaaaagccttcggctatcggaaggaggatttgcgctaccagaagacgaagcaggtcggctcgggcgcgtggctgaaggtgaaggggaagaagggtaccgaagcttacgtagaacaaaaactcatctcagaagaggatctgaatagcgccgtcgaccatcatcatcatcatcattga

SEQ ID NO: 282 - protein, 802 aa, Artificial Sequence
  Description of Artificial Sequence:Thermococcus species 9degreesN-7 mutant DNA polymerase, 9degreesN mutant
MILDTDYITENGKPVIRVFKKENGEFKIEYDRTFEPYFYALLKDDSAIEDVKKVTAKRHGTVVKVKRAEKVQKKFLGRPIEVWKLYFNHPQDVPAIRDRIRAHPAVVDIYEYDIPFAKRYLIDKGLIPMEGDEELTMLAFAIATLYHEGEEFGTGPILMISYADGSEARVITWKKIDLPYVDVVSTEKEMIKRFLRVVREKDPDVLITYNGDNFDFAYLKKRCEELGIKFTLGRDGSEPKIQRMGDRFAVEVKGRIHFDLYPVIRRTINLPTYTLEAVYEAVFGKPKEKVYAEEIAQAWESGEGLERVARYSMEDAKVTYELGREFFPMEAQLSRLIGQSLWDVSRSSTGNLVEWFLLRKAYKRNELAPNKPDERELARRRGGYAGGYVKEPERGLWDNIVYLDFRALYPSIIITHNVSPDTLNREGCKEYDVAPEVGHKFCKDFPGFIPSLLGDLLEERQKIKRKMKATVDPLEKKLLVYRQWLIKILANSFYGYYGYAKARWYCKECAESVTAWGREYIEMVIRELEEKFGFKVLYADTDGLHATIPGADAETVKKKAKEFLKYINPKLPGLLELEYEGFYVRGFFVTKKKYAVIDEEGKITTRGLEIVRRDWSEIAKETQARVLEAILKHGDVEEAVRIVKEVTEKLSKYEVPPEKLVIHEQITRDLRDYKATGPHVAVAKRLAARGVKIRPGTVISYIVLKGSGRIGDRAIPADEFDPTKHRYDAEYYIENQVLPAVERILKAFGYRKEDLRYQKTKQVGSGAWLKVKGKKGTEAYVEQKLISEEDLNSAVDHHHHHH

SEQ ID NO: 283 - DNA, 2409 bp, Artificial Sequence
  Description of Artificial Sequence:Thermococcus species 9degreesN-7 mutant DNA polymerase, 9degreesN mutant
atgattctcgataccgactacatcaccgagaacgggaagcccgtgataagggtcttcaagaaggagaacggcgagtttaaaatcgagtacgacagaaccttcgagccctacttctacgcccttctgaaggacgattctgcgatagaggacgtcaagaaggtaaccgcaaagaggcacggaacggttgtcaaggtgaagcgcgccgagaaggtgcagaagaagttcctcggcaggccgatagaggtctggaagctctacttcaaccatcctcaggacgtcccggcgattcgagacaggatacgcgcccaccccgctgtcgttgacatctacgagtacgacatacccttcgccaagcgctacctcatcgacaagggcctgattccgatggagggcgacgaggagcttacgatgctcgccttcgcgatcgcaaccctctatcacgagggcgaggagttcggaaccgggccgattctcatgataagctacgccgacgggagcgaggcgagggtgataacctggaagaagattgaccttccgtacgttgacgtcgtctcgaccgagaaggagatgattaagcgcttcctccgcgtcgtcagggagaaggaccccgacgtgctcatcacctacaacggcgacaacttcgacttcgcctacctgaagaagcgctgtgaggaactcggaataaagttcacactcggcagggacgggagcgagccgaagatacagcgaatgggcgaccgctttgccgttgaggtgaagggcaggattcacttcgacctctaccccgtcataaggcgcacgataaacctcccgacctacacccttgaggccgtttacgaggccgtctttggaaagcccaaggagaaggtttacgcagaggagatagcgcaggcctgggagagcggggagggccttgaaagggttgcaagatactcgatggaggacgctaaggtgacctacgagctgggaagggagttcttcccgatggaggcccagctttcgaggcttataggccagagcctctgggacgtctcgcgctcgagcaccggaaatttggtggagtggttcctcctgcggaaggcctacaagaggaacgagctcgccccaaacaagcccgacgagagggagctcgcgagacggcgcgggggctacgctggcgggtacgttaaggaaccagagcggggattgtgggacaacattgtgtatttagacttccgctcgctgtatccttcaatcatcataacccacaacgtctcgccggataccctcaaccgcgagggctgtaaagagtacgacgtcgcccctgaggttggacacaagttctgcaaggacttccccggcttcataccaagcctcctgggagatttgctcgaggagaggcagaagataaagcggaagatgaaggcaacggttgacccgctggagaagaaactcctcgtgtacaggcagtggcttataaaaatcctcgccaacagcttctacggctcgtacggctacgccaaggcccggtggtactgcaaggagtgcgccgagagcgttacggcctggggaagggagtatatagaaatggttatccgggaactcgaagaaaaattcggttttaaagttctctatgccgatacagacggtctccatgctaccattcccggagcagacgctgaaacagtcaagaaaaaagcaaaggagttcttaaaatacattaatccaaaactgcccggcctgctcgaacttgagtacgagggcttctacgtgaggggcttcttcgtcacgaagaagaagtacgctgtgatagacgaggagggcaagataaccacgaggggtcttgagattgtgaggcgcgactggagcgagatagcgaaggagacccaggccagggtcttagaggcgatactcaagcacggtgacgtcgaggaggccgttaggatagtcaaggaagtgacggaaaagctgagcaagtatgaggtcccgcccgagaagctggtaatccacgagcagataacgcgcgatttgagggattacaaagccaccggcccgcacgttgccgttgcgaagaggctcgcggcgcgtggagtgaaaatccggcccggcacggtgataagctacatcgtcctaaagggctctggaaggataggcgacagggcgattccagctgatgagttcgacccgacgaagcaccgctacgatgcggaatactacatcgagaaccaggttctcccggcggtggagaggattctaaaagccttcggctatcggaaggaggatttgcgctaccagaagacgaagcaggtcggctcgggcgcgtggctgaaggtgaaggggaagaagggtaccgaagcttacgtagaacaaaaactcatctcagaagaggatctgaatagcgccgtcgaccatcatcatcatcatcattga

SEQ ID NO: 284 - protein, 802 aa, Artificial Sequence
  Description of Artificial Sequence:Thermococcus species 9degreesN-7 mutant DNA polymerase, 9degreesN mutant
MILDTDYITENGKPVIRVFKKENGEFKIEYDRTFEPYFYALLKDDSAIEDVKKVTAKRHGTVVKVKRAEKVQKKFLGRPIEVWKLYFNHPQDVPAIRDRIRAHPAVVDIYEYDIPFAKRYLIDKGLIPMEGDEELTMLAFAIATLYHEGEEFGTGPILMISYADGSEARVITWKKIDLPYVDVVSTEKEMIKRFLRVVREKDPDVLITYNGDNFDFAYLKKRCEELGIKFTLGRDGSEPKIQRMGDRFAVEVKGRIHFDLYPVIRRTINLPTYTLEAVYEAVFGKPKEKVYAEEIAQAWESGEGLERVARYSMEDAKVTYELGREFFPMEAQLSRLIGQSLWDVSRSSTGNLVEWFLLRKAYKRNELAPNKPDERELARRRGGYAGGYVKEPERGLWDNIVYLDFRSLYPSIIITHNVSPDTLNREGCKEYDVAPEVGHKFCKDFPGFIPSLLGDLLEERQKIKRKMKATVDPLEKKLLVYRQWLIKILANSFYGSYGYAKARWYCKECAESVTAWGREYIEMVIRELEEKFGFKVLYADTDGLHATIPGADAETVKKKAKEFLKYINPKLPGLLELEYEGFYVRGFFVTKKKYAVIDEEGKITTRGLEIVRRDWSEIAKETQARVLEAILKHGDVEEAVRIVKEVTEKLSKYEVPPEKLVIHEQITRDLRDYKATGPHVAVAKRLAARGVKIRPGTVISYIVLKGSGRIGDRAIPADEFDPTKHRYDAEYYIENQVLPAVERILKAFGYRKEDLRYQKTKQVGSGAWLKVKGKKGTEAYVEQKLISEEDLNSAVDHHHHHH

SEQ ID NO: 285 - DNA, 2409 bp, Artificial Sequence
  Description of Artificial Sequence:Thermococcus species 9degreesN-7 mutant DNA polymerase, 9degreesN mutant
atgattctcgataccgactacatcaccgagaacgggaagcccgtgataagggtcttcaagaaggagaacggcgagtttaaaatcgagtacgacagaaccttcgagccctacttctacgcccttctgaaggacgattctgcgatagaggacgtcaagaaggtaaccgcaaagaggcacggaacggttgtcaaggtgaagcgcgccgagaaggtgcagaagaagttcctcggcaggccgatagaggtctggaagctctacttcaaccatcctcaggacgtcccggcgattcgagacaggatacgcgcccaccccgctgtcgttgacatctacgagtacgacatacccttcgccaagcgctacctcatcgacaagggcctgattccgatggagggcgacgaggagcttacgatgctcgccttcgcgatcgcaaccctctatcacgagggcgaggagttcggaaccgggccgattctcatgataagctacgccgacgggagcgaggcgagggtgataacctggaagaagattgaccttccgtacgttgacgtcgtctcgaccgagaaggagatgattaagcgcttcctccgcgtcgtcagggagaaggaccccgacgtgctcatcacctacaacggcgacaacttcgacttcgcctacctgaagaagcgctgtgaggaactcggaataaagttcacactcggcagggacgggagcgagccgaagatacagcgaatgggcgaccgctttgccgttgaggtgaagggcaggattcacttcgacctctaccccgtcataaggcgcacgataaacctcccgacctacacccttgaggccgtttacgaggccgtctttggaaagcccaaggagaaggtttacgcagaggagatagcgcaggcctgggagagcggggagggccttgaaagggttgcaagatactcgatggaggacgctaaggtgacctacgagctgggaagggagttcttcccgatggaggcccagctttcgaggcttataggccagagcctctgggacgtctcgcgctcgagcaccggaaatttggtggagtggttcctcctgcggaaggcctacaagaggaacgagctcgccccaaacaagcccgacgagagggagctcgcgagacggcgcgggggctacgctggcgggtacgttaaggaaccagagcggggattgtgggacaacattgtgtatttagacttccgctcgctgtatccttcaatcatcataacccacaacgtctcgccggataccctcaaccgcgagggctgtaaagagtacgacgtcgcccctgaggttggacacaagttctgcaaggacttccccggcttcataccaagcctcctgggagatttgctcgaggagaggcagaagataaagcggaagatgaaggcaacggttgacccgctggagaagaaactcctcgtgtacaggcagtggcttataaaaatcctcgccaacagcttctacggcacatacggctacgccaaggcccggtggtactgcaaggagtgcgccgagagcgttacggcctggggaagggagtatatagaaatggttatccgggaactcgaagaaaaattcggttttaaagttctctatgccgatacagacggtctccatgctaccattcccggagcagacgctgaaacagtcaagaaaaaagcaaaggagttcttaaaatacattaatccaaaactgcccggcctgctcgaacttgagtacgagggcttctacgtgaggggcttcttcgtcacgaagaagaagtacgctgtgatagacgaggagggcaagataaccacgaggggtcttgagattgtgaggcgcgactggagcgagatagcgaaggagacccaggccagggtcttagaggcgatactcaagcacggtgacgtcgaggaggccgttaggatagtcaaggaagtgacggaaaagctgagcaagtatgaggtcccgcccgagaagctggtaatccacgagcagataacgcgcgatttgagggattacaaagccaccggcccgcacgttgccgttgcgaagaggctcgcggcgcgtggagtgaaaatccggcccggcacggtgataagctacatcgtcctaaagggctctggaaggataggcgacagggcgattccagctgatgagttcgacccgacgaagcaccgctacgatgcggaatactacatcgagaaccaggttctcccggcggtggagaggattctaaaagccttcggctatcggaaggaggatttgcgctaccagaagacgaagcaggtcggctcgggcgcgtggctgaaggtgaaggggaagaagggtaccgaagcttacgtagaacaaaaactcatctcagaagaggatctgaatagcgccgtcgaccatcatcatcatcatcattga

SEQ ID NO: 286 - protein, 802 aa, Artificial Sequence
  Description of Artificial Sequence:Thermococcus species 9degreesN-7 mutant DNA polymerase, 9degreesN mutant
MILDTDYITENGKPVIRVFKKENGEFKIEYDRTFEPYFYALLKDDSAIEDVKKVTAKRHGTVVKVKRAEKVQKKFLGRPIEVWKLYFNHPQDVPAIRDRIRAHPAVVDIYEYDIPFAKRYLIDKGLIPMEGDEELTMLAFAIATLYHEGEEFGTGPILMISYADGSEARVITWKKIDLPYVDVVSTEKEMIKRFLRVVREKDPDVLITYNGDNFDFAYLKKRCEELGIKFTLGRDGSEPKIQRMGDRFAVEVKGRIHFDLYPVIRRTINLPTYTLEAVYEAVFGKPKEKVYAEEIAQAWESGEGLERVARYSMEDAKVTYELGREFFPMEAQLSRLIGQSLWDVSRSSTGNLVEWFLLRKAYKRNELAPNKPDERELARRRGGYAGGYVKEPERGLWDNIVYLDFRSLYPSIIITHNVSPDTLNREGCKEYDVAPEVGHKFCKDFPGFIPSLLGDLLEERQKIKRKMKATVDPLEKKLLVYRQWLIKILANSFYGTYGYAKARWYCKECAESVTAWGREYIEMVIRELEEKFGFKVLYADTDGLHATIPGADAETVKKKAKEFLKYINPKLPGLLELEYEGFYVRGFFVTKKKYAVIDEEGKITTRGLEIVRRDWSEIAKETQARVLEAILKHGDVEEAVRIVKEVTEKLSKYEVPPEKLVIHEQITRDLRDYKATGPHVAVAKRLAARGVKIRPGTVISYIVLKGSGRIGDRAIPADEFDPTKHRYDAEYYIENQVLPAVERILKAFGYRKEDLRYQKTKQVGSGAWLKVKGKKGTEAYVEQKLISEEDLNSAVDHHHHHH

SEQ ID NO: 287 - DNA, 2409 bp, Artificial Sequence
  Description of Artificial Sequence:Thermococcus species 9degreesN-7 mutant DNA polymerase, 9degreesN mutant
atgattctcgataccgactacatcaccgagaacgggaagcccgtgataagggtcttcaagaaggagaacggcgagtttaaaatcgagtacgacagaaccttcgagccctacttctacgcccttctgaaggacgattctgcgatagaggacgtcaagaaggtaaccgcaaagaggcacggaacggttgtcaaggtgaagcgcgccgagaaggtgcagaagaagttcctcggcaggccgatagaggtctggaagctctacttcaaccatcctcaggacgtcccggcgattcgagacaggatacgcgcccaccccgctgtcgttgacatctacgagtacgacatacccttcgccaagcgctacctcatcgacaagggcctgattccgatggagggcgacgaggagcttacgatgctcgccttcgcgatcgcaaccctctatcacgagggcgaggagttcggaaccgggccgattctcatgataagctacgccgacgggagcgaggcgagggtgataacctggaagaagattgaccttccgtacgttgacgtcgtctcgaccgagaaggagatgattaagcgcttcctccgcgtcgtcagggagaaggaccccgacgtgctcatcacctacaacggcgacaacttcgacttcgcctacctgaagaagcgctgtgaggaactcggaataaagttcacactcggcagggacgggagcgagccgaagatacagcgaatgggcgaccgctttgccgttgaggtgaagggcaggattcacttcgacctctaccccgtcataaggcgcacgataaacctcccgacctacacccttgaggccgtttacgaggccgtctttggaaagcccaaggagaaggtttacgcagaggagatagcgcaggcctgggagagcggggagggccttgaaagggttgcaagatactcgatggaggacgctaaggtgacctacgagctgggaagggagttcttcccgatggaggcccagctttcgaggcttataggccagagcctctgggacgtctcgcgctcgagcaccggaaatttggtggagtggttcctcctgcggaaggcctacaagaggaacgagctcgccccaaacaagcccgacgagagggagctcgcgagacggcgcgggggctacgctggcgggtacgttaaggaaccagagcggggattgtgggacaacattgtgtatttagacttccgctcgctgtatccttcaatcatcataacccacaacgtctcgccggataccctcaaccgcgagggctgtaaagagtacgacgtcgcccctgaggttggacacaagttctgcaaggacttccccggcttcataccaagcctcctgggagatttgctcgaggagaggcagaagataaagcggaagatgaaggcaacggttgacccgctggagaagaaactcctcgtgtacaggcagtggcttataaaaatcctcgccaacagcttctacggccactacggctacgccaaggcccggtggtactgcaaggagtgcgccgagagcgttacggcctggggaagggagtatatagaaatggttatccgggaactcgaagaaaaattcggttttaaagttctctatgccgatacagacggtctccatgctaccattcccggagcagacgctgaaacagtcaagaaaaaagcaaaggagttcttaaaatacattaatccaaaactgcccggcctgctcgaacttgagtacgagggcttctacgtgaggggcttcttcgtcacgaagaagaagtacgctgtgatagacgaggagggcaagataaccacgaggggtcttgagattgtgaggcgcgactggagcgagatagcgaaggagacccaggccagggtcttagaggcgatactcaagcacggtgacgtcgaggaggccgttaggatagtcaaggaagtgacggaaaagctgagcaagtatgaggtcccgcccgagaagctggtaatccacgagcagataacgcgcgatttgagggattacaaagccaccggcccgcacgttgccgttgcgaagaggctcgcggcgcgtggagtgaaaatccggcccggcacggtgataagctacatcgtcctaaagggctctggaaggataggcgacagggcgattccagctgatgagttcgacccgacgaagcaccgctacgatgcggaatactacatcgagaaccaggttctcccggcggtggagaggattctaaaagccttcggctatcggaaggaggatttgcgctaccagaagacgaagcaggtcggctcgggcgcgtggctgaaggtgaaggggaagaagggtaccgaagcttacgtagaacaaaaactcatctcagaagaggatctgaatagcgccgtcgaccatcatcatcatcatcattga

SEQ ID NO: 288 - protein, 802 aa, Artificial Sequence
  Description of Artificial Sequence:Thermococcus species 9degreesN-7 mutant DNA polymerase, 9degreesN mutant
MILDTDYITENGKPVIRVFKKENGEFKIEYDRTFEPYFYALLKDDSAIEDVKKVTAKRHGTVVKVKRAEKVQKKFLGRPIEVWKLYFNHPQDVPAIRDRIRAHPAVVDIYEYDIPFAKRYLIDKGLIPMEGDEELTMLAFAIATLYHEGEEFGTGPILMISYADGSEARVITWKKIDLPYVDVVSTEKEMIKRFLRVVREKDPDVLITYNGDNFDFAYLKKRCEELGIKFTLGRDGSEPKIQRMGDRFAVEVKGRIHFDLYPVIRRTINLPTYTLEAVYEAVFGKPKEKVYAEEIAQAWESGEGLERVARYSMEDAKVTYELGREFFPMEAQLSRLIGQSLWDVSRSSTGNLVEWFLLRKAYKRNELAPNKPDERELARRRGGYAGGYVKEPERGLWDNIVYLDFRSLYPSIIITHNVSPDTLNREGCKEYDVAPEVGHKFCKDFPGFIPSLLGDLLEERQKIKRKMKATVDPLEKKLLVYRQWLIKILANSFYGHYGYAKARWYCKECAESVTAWGREYIEMVIRELEEKFGFKVLYADTDGLHATIPGADAETVKKKAKEFLKYINPKLPGLLELEYEGFYVRGFFVTKKKYAVIDEEGKITTRGLEIVRRDWSEIAKETQARVLEAILKHGDVEEAVRIVKEVTEKLSKYEVPPEKLVIHEQITRDLRDYKATGPHVAVAKRLAARGVKIRPGTVISYIVLKGSGRIGDRAIPADEFDPTKHRYDAEYYIENQVLPAVERILKAFGYRKEDLRYQKTKQVGSGAWLKVKGKKGTEAYVEQKLISEEDLNSAVDHHHHHH

SEQ ID NO: 289 - DNA, 2409 bp, Artificial Sequence
  Description of Artificial Sequence:Thermococcus species 9degreesN-7 mutant DNA polymerase, 9degreesN mutant
atgattctcgataccgactacatcaccgagaacgggaagcccgtgataagggtcttcaagaaggagaacggcgagtttaaaatcgagtacgacagaaccttcgagccctacttctacgcccttctgaaggacgattctgcgatagaggacgtcaagaaggtaaccgcaaagaggcacggaacggttgtcaaggtgaagcgcgccgagaaggtgcagaagaagttcctcggcaggccgatagaggtctggaagctctacttcaaccatcctcaggacgtcccggcgattcgagacaggatacgcgcccaccccgctgtcgttgacatctacgagtacgacatacccttcgccaagcgctacctcatcgacaagggcctgattccgatggagggcgacgaggagcttacgatgctcgccttcgcgatcgcaaccctctatcacgagggcgaggagttcggaaccgggccgattctcatgataagctacgccgacgggagcgaggcgagggtgataacctggaagaagattgaccttccgtacgttgacgtcgtctcgaccgagaaggagatgattaagcgcttcctccgcgtcgtcagggagaaggaccccgacgtgctcatcacctacaacggcgacaacttcgacttcgcctacctgaagaagcgctgtgaggaactcggaataaagttcacactcggcagggacgggagcgagccgaagatacagcgaatgggcgaccgctttgccgttgaggtgaagggcaggattcacttcgacctctaccccgtcataaggcgcacgataaacctcccgacctacacccttgaggccgtttacgaggccgtctttggaaagcccaaggagaaggtttacgcagaggagatagcgcaggcctgggagagcggggagggccttgaaagggttgcaagatactcgatggaggacgctaaggtgacctacgagctgggaagggagttcttcccgatggaggcccagctttcgaggcttataggccagagcctctgggacgtctcgcgctcgagcaccggaaatttggtggagtggttcctcctgcggaaggcctacaagaggaacgagctcgccccaaacaagcccgacgagagggagctcgcgagacggcgcgggggctacgctggcgggtacgttaaggaaccagagcggggattgtgggacaacattgtgtatttagacttccgctcgctgtatccttcaatcatcataacccacaacgtctcgccggataccctcaaccgcgagggctgtaaagagtacgacgtcgcccctgaggttggacacaagttctgcaaggacttccccggcttcataccaagcctcctgggagatttgctcgaggagaggcagaagataaagcggaagatgaaggcaacggttgacccgctggagaagaaactcctcgtgtacaggcagtggcttataaaaatcctcgccaacagcttctacggcatctacggctacgccaaggcccggtggtactgcaaggagtgcgccgagagcgttacggcctggggaagggagtatatagaaatggttatccgggaactcgaagaaaaattcggttttaaagttctctatgccgatacagacggtctccatgctaccattcccggagcagacgctgaaacagtcaagaaaaaagcaaaggagttcttaaaatacattaatccaaaactgcccggcctgctcgaacttgagtacgagggcttctacgtgaggggcttcttcgtcacgaagaagaagtacgctgtgatagacgaggagggcaagataaccacgaggggtcttgagattgtgaggcgcgactggagcgagatagcgaaggagacccaggccagggtcttagaggcgatactcaagcacggtgacgtcgaggaggccgttaggatagtcaaggaagtgacggaaaagctgagcaagtatgaggtcccgcccgagaagctggtaatccacgagcagataacgcgcgatttgagggattacaaagccaccggcccgcacgttgccgttgcgaagaggctcgcggcgcgtggagtgaaaatccggcccggcacggtgataagctacatcgtcctaaagggctctggaaggataggcgacagggcgattccagctgatgagttcgacccgacgaagcaccgctacgatgcggaatactacatcgagaaccaggttctcccggcggtggagaggattctaaaagccttcggctatcggaaggaggatttgcgctaccagaagacgaagcaggtcggctcgggcgcgtggctgaaggtgaaggggaagaagggtaccgaagcttacgtagaacaaaaactcatctcagaagaggatctgaatagcgccgtcgaccatcatcatcatcatcattga

SEQ ID NO: 290 - protein, 802 aa, Artificial Sequence
  Description of Artificial Sequence:Thermococcus species 9degreesN-7 mutant DNA polymerase, 9degreesN mutant
MILDTDYITENGKPVIRVFKKENGEFKIEYDRTFEPYFYALLKDDSAIEDVKKVTAKRHGTVVKVKRAEKVQKKFLGRPIEVWKLYFNHPQDVPAIRDRIRAHPAVVDIYEYDIPFAKRYLIDKGLIPMEGDEELTMLAFAIATLYHEGEEFGTGPILMISYADGSEARVITWKKIDLPYVDVVSTEKEMIKRFLRVVREKDPDVLITYNGDNFDFAYLKKRCEELGIKFTLGRDGSEPKIQRMGDRFAVEVKGRIHFDLYPVIRRTINLPTYTLEAVYEAVFGKPKEKVYAEEIAQAWESGEGLERVARYSMEDAKVTYELGREFFPMEAQLSRLIGQSLWDVSRSSTGNLVEWFLLRKAYKRNELAPNKPDERELARRRGGYAGGYVKEPERGLWDNIVYLDFRSLYPSIIITHNVSPDTLNREGCKEYDVAPEVGHKFCKDFPGFIPSLLGDLLEERQKIKRKMKATVDPLEKKLLVYRQWLIKILANSFYGIYGYAKARWYCKECAESVTAWGREYIEMVIRELEEKFGFKVLYADTDGLHATIPGADAETVKKKAKEFLKYINPKLPGLLELEYEGFYVRGFFVTKKKYAVIDEEGKITTRGLEIVRRDWSEIAKETQARVLEAILKHGDVEEAVRIVKEVTEKLSKYEVPPEKLVIHEQITRDLRDYKATGPHVAVAKRLAARGVKIRPGTVISYIVLKGSGRIGDRAIPADEFDPTKHRYDAEYYIENQVLPAVERILKAFGYRKEDLRYQKTKQVGSGAWLKVKGKKGTEAYVEQKLISEEDLNSAVDHHHHHH

SEQ ID NO: 291 - DNA, 2409 bp, Artificial Sequence
  Description of Artificial Sequence:Thermococcus species 9degreesN-7 mutant DNA polymerase, 9degreesN mutant
atgattctcgataccgactacatcaccgagaacgggaagcccgtgataagggtcttcaagaaggagaacggcgagtttaaaatcgagtacgacagaaccttcgagccctacttctacgcccttctgaaggacgattctgcgatagaggacgtcaagaaggtaaccgcaaagaggcacggaacggttgtcaaggtgaagcgcgccgagaaggtgcagaagaagttcctcggcaggccgatagaggtctggaagctctacttcaaccatcctcaggacgtcccggcgattcgagacaggatacgcgcccaccccgctgtcgttgacatctacgagtacgacatacccttcgccaagcgctacctcatcgacaagggcctgattccgatggagggcgacgaggagcttacgatgctcgccttcgcgatcgcaaccctctatcacgagggcgaggagttcggaaccgggccgattctcatgataagctacgccgacgggagcgaggcgagggtgataacctggaagaagattgaccttccgtacgttgacgtcgtctcgaccgagaaggagatgattaagcgcttcctccgcgtcgtcagggagaaggaccccgacgtgctcatcacctacaacggcgacaacttcgacttcgcctacctgaagaagcgctgtgaggaactcggaataaagttcacactcggcagggacgggagcgagccgaagatacagcgaatgggcgaccgctttgccgttgaggtgaagggcaggattcacttcgacctctaccccgtcataaggcgcacgataaacctcccgacctacacccttgaggccgtttacgaggccgtctttggaaagcccaaggagaaggtttacgcagaggagatagcgcaggcctgggagagcggggagggccttgaaagggttgcaagatactcgatggaggacgctaaggtgacctacgagctgggaagggagttcttcccgatggaggcccagctttcgaggcttataggccagagcctctgggacgtctcgcgctcgagcaccggaaatttggtggagtggttcctcctgcggaaggcctacaagaggaacgagctcgccccaaacaagcccgacgagagggagctcgcgagacggcgcgggggctacgctggcgggtacgttaaggaaccagagcggggattgtgggacaacattgtgtatttagacttccgctcgctgtatccttcaatcatcataacccacaacgtctcgccggataccctcaaccgcgagggctgtaaagagtacgacgtcgcccctgaggttggacacaagttctgcaaggacttccccggcttcataccaagcctcctgggagatttgctcgaggagaggcagaagataaagcggaagatgaaggcaacggttgacccgctggagaagaaactcctcgtgtacaggcagtggcttataaaaatcctcgccaacagcttctacggcatgtacggctacgccaaggcccggtggtactgcaaggagtgcgccgagagcgttacggcctggggaagggagtatatagaaatggttatccgggaactcgaagaaaaattcggttttaaagttctctatgccgatacagacggtctccatgctaccattcccggagcagacgctgaaacagtcaagaaaaaagcaaaggagttcttaaaatacattaatccaaaactgcccggcctgctcgaacttgagtacgagggcttctacgtgaggggcttcttcgtcacgaagaagaagtacgctgtgatagacgaggagggcaagataaccacgaggggtcttgagattgtgaggcgcgactggagcgagatagcgaaggagacccaggccagggtcttagaggcgatactcaagcacggtgacgtcgaggaggccgttaggatagtcaaggaagtgacggaaaagctgagcaagtatgaggtcccgcccgagaagctggtaatccacgagcagataacgcgcgatttgagggattacaaagccaccggcccgcacgttgccgttgcgaagaggctcgcggcgcgtggagtgaaaatccggcccggcacggtgataagctacatcgtcctaaagggctctggaaggataggcgacagggcgattccagctgatgagttcgacccgacgaagcaccgctacgatgcggaatactacatcgagaaccaggttctcccggcggtggagaggattctaaaagccttcggctatcggaaggaggatttgcgctaccagaagacgaagcaggtcggctcgggcgcgtggctgaaggtgaaggggaagaagggtaccgaagcttacgtagaacaaaaactcatctcagaagaggatctgaatagcgccgtcgaccatcatcatcatcatcattga

SEQ ID NO: 292 - protein, 802 aa, Artificial Sequence
  Description of Artificial Sequence:Thermococcus species 9degreesN-7 mutant DNA polymerase, 9degreesN mutant
MILDTDYITENGKPVIRVFKKENGEFKIEYDRTFEPYFYALLKDDSAIEDVKKVTAKRHGTVVKVKRAEKVQKKFLGRPIEVWKLYFNHPQDVPAIRDRIRAHPAVVDIYEYDIPFAKRYLIDKGLIPMEGDEELTMLAFAIATLYHEGEEFGTGPILMISYADGSEARVITWKKIDLPYVDVVSTEKEMIKRFLRVVREKDPDVLITYNGDNFDFAYLKKRCEELGIKFTLGRDGSEPKIQRMGDRFAVEVKGRIHFDLYPVIRRTINLPTYTLEAVYEAVFGKPKEKVYAEEIAQAWESGEGLERVARYSMEDAKVTYELGREFFPMEAQLSRLIGQSLWDVSRSSTGNLVEWFLLRKAYKRNELAPNKPDERELARRRGGYAGGYVKEPERGLWDNIVYLDFRSLYPSIIITHNVSPDTLNREGCKEYDVAPEVGHKFCKDFPGFIPSLLGDLLEERQKIKRKMKATVDPLEKKLLVYRQWLIKILANSFYGMYGYAKARWYCKECAESVTAWGREYIEMVIRELEEKFGFKVLYADTDGLHATIPGADAETVKKKAKEFLKYINPKLPGLLELEYEGFYVRGFFVTKKKYAVIDEEGKITTRGLEIVRRDWSEIAKETQARVLEAILKHGDVEEAVRIVKEVTEKLSKYEVPPEKLVIHEQITRDLRDYKATGPHVAVAKRLAARGVKIRPGTVISYIVLKGSGRIGDRAIPADEFDPTKHRYDAEYYIENQVLPAVERILKAFGYRKEDLRYQKTKQVGSGAWLKVKGKKGTEAYVEQKLISEEDLNSAVDHHHHHH

SEQ ID NO: 293 - DNA, 2409 bp, Artificial Sequence
  Description of Artificial Sequence:Thermococcus species 9degreesN-7 mutant DNA polymerase, 9degreesN mutant
atgattctcgataccgactacatcaccgagaacgggaagcccgtgataagggtcttcaagaaggagaacggcgagtttaaaatcgagtacgacagaaccttcgagccctacttctacgcccttctgaaggacgattctgcgatagaggacgtcaagaaggtaaccgcaaagaggcacggaacggttgtcaaggtgaagcgcgccgagaaggtgcagaagaagttcctcggcaggccgatagaggtctggaagctctacttcaaccatcctcaggacgtcccggcgattcgagacaggatacgcgcccaccccgctgtcgttgacatctacgagtacgacatacccttcgccaagcgctacctcatcgacaagggcctgattccgatggagggcgacgaggagcttacgatgctcgccttcgcgatcgcaaccctctatcacgagggcgaggagttcggaaccgggccgattctcatgataagctacgccgacgggagcgaggcgagggtgataacctggaagaagattgaccttccgtacgttgacgtcgtctcgaccgagaaggagatgattaagcgcttcctccgcgtcgtcagggagaaggaccccgacgtgctcatcacctacaacggcgacaacttcgacttcgcctacctgaagaagcgctgtgaggaactcggaataaagttcacactcggcagggacgggagcgagccgaagatacagcgaatgggcgaccgctttgccgttgaggtgaagggcaggattcacttcgacctctaccccgtcataaggcgcacgataaacctcccgacctacacccttgaggccgtttacgaggccgtctttggaaagcccaaggagaaggtttacgcagaggagatagcgcaggcctgggagagcggggagggccttgaaagggttgcaagatactcgatggaggacgctaaggtgacctacgagctgggaagggagttcttcccgatggaggcccagctttcgaggcttataggccagagcctctgggacgtctcgcgctcgagcaccggaaatttggtggagtggttcctcctgcggaaggcctacaagaggaacgagctcgccccaaacaagcccgacgagagggagctcgcgagacggcgcgggggctacgctggcgggtacgttaaggaaccagagcggggattgtgggacaacattgtgtatttagacttccgctcgctgtatccttcaatcatcataacccacaacgtctcgccggataccctcaaccgcgagggctgtaaagagtacgacgtcgcccctgaggttggacacaagttctgcaaggacttccccggcttcataccaagcctcctgccggatttgctcgaggagaggcagaagataaagcggaagatgaaggcaacggttgacccgctggagaagaaactcctcgtgtacaggcagtggcttataaaaatcctcgccaacagcttctacggctactacggctacgccaaggcccggtggtactgcaaggagtgcgccgagagcgttacggcctggggaagggagtatatagaaatggttatccgggaactcgaagaaaaattcggttttaaagttctctatgccgatacagacggtctccatgctaccattcccggagcagacgctgaaacagtcaagaaaaaagcaaaggagttcttaaaatacattaatccaaaactgcccggcctgctcgaacttgagtacgagggcttctacgtgaggggcttcttcgtcacgaagaagaagtacgctgtgatagacgaggagggcaagataaccacgaggggtcttgagattgtgaggcgcgactggagcgagatagcgaaggagacccaggccagggtcttagaggcgatactcaagcacggtgacgtcgaggaggccgttaggatagtcaaggaagtgacggaaaagctgagcaagtatgaggtcccgcccgagaagctggtaatccacgagcagataacgcgcgatttgagggattacaaagccaccggcccgcacgttgccgttgcgaagaggctcgcggcgcgtggagtgaaaatccggcccggcacggtgataagctacatcgtcctaaagggctctggaaggataggcgacagggcgattccagctgatgagttcgacccgacgaagcaccgctacgatgcggaatactacatcgagaaccaggttctcccggcggtggagaggattctaaaagccttcggctatcggaaggaggatttgcgctaccagaagacgaagcaggtcggctcgggcgcgtggctgaaggtgaaggggaagaagggtaccgaagcttacgtagaacaaaaactcatctcagaagaggatctgaatagcgccgtcgaccatcatcatcatcatcattga

SEQ ID NO: 294 - protein, 802 aa, Artificial Sequence
  Description of Artificial Sequence:Thermococcus species 9degreesN-7 mutant DNA polymerase, 9degreesN mutant
MILDTDYITENGKPVIRVFKKENGEFKIEYDRTFEPYFYALLKDDSAIEDVKKVTAKRHGTVVKVKRAEKVQKKFLGRPIEVWKLYFNHPQDVPAIRDRIRAHPAVVDIYEYDIPFAKRYLIDKGLIPMEGDEELTMLAFAIATLYHEGEEFGTGPILMISYADGSEARVITWKKIDLPYVDVVSTEKEMIKRFLRVVREKDPDVLITYNGDNFDFAYLKKRCEELGIKFTLGRDGSEPKIQRMGDRFAVEVKGRIHFDLYPVIRRTINLPTYTLEAVYEAVFGKPKEKVYAEEIAQAWESGEGLERVARYSMEDAKVTYELGREFFPMEAQLSRLIGQSLWDVSRSSTGNLVEWFLLRKAYKRNELAPNKPDERELARRRGGYAGGYVKEPERGLWDNIVYLDFRSLYPSIIITHNVSPDTLNREGCKEYDVAPEVGHKFCKDFPGFIPSLLPDLLEERQKIKRKMKATVDPLEKKLLVYRQWLIKILANSFYGYYGYAKARWYCKECAESVTAWGREYIEMVIRELEEKFGFKVLYADTDGLHATIPGADAETVKKKAKEFLKYINPKLPGLLELEYEGFYVRGFFVTKKKYAVIDEEGKITTRGLEIVRRDWSEIAKETQARVLEAILKHGDVEEAVRIVKEVTEKLSKYEVPPEKLVIHEQITRDLRDYKATGPHVAVAKRLAARGVKIRPGTVISYIVLKGSGRIGDRAIPADEFDPTKHRYDAEYYIENQVLPAVERILKAFGYRKEDLRYQKTKQVGSGAWLKVKGKKGTEAYVEQKLISEEDLNSAVDHHHHHH

SEQ ID NO: 295 - DNA, 2409 bp, Artificial Sequence
  Description of Artificial Sequence:Thermococcus species 9degreesN-7 mutant DNA polymerase, 9degreesN mutant
atgattctcgataccgactacatcaccgagaacgggaagcccgtgataagggtcttcaagaaggagaacggcgagtttaaaatcgagtacgacagaaccttcgagccctacttctacgcccttctgaaggacgattctgcgatagaggacgtcaagaaggtaaccgcaaagaggcacggaacggttgtcaaggtgaagcgcgccgagaaggtgcagaagaagttcctcggcaggccgatagaggtctggaagctctacttcaaccatcctcaggacgtcccggcgattcgagacaggatacgcgcccaccccgctgtcgttgacatctacgagtacgacatacccttcgccaagcgctacctcatcgacaagggcctgattccgatggagggcgacgaggagcttacgatgctcgccttcgcgatcgcaaccctctatcacgagggcgaggagttcggaaccgggccgattctcatgataagctacgccgacgggagcgaggcgagggtgataacctggaagaagattgaccttccgtacgttgacgtcgtctcgaccgagaaggagatgattaagcgcttcctccgcgtcgtcagggagaaggaccccgacgtgctcatcacctacaacggcgacaacttcgacttcgcctacctgaagaagcgctgtgaggaactcggaataaagttcacactcggcagggacgggagcgagccgaagatacagcgaatgggcgaccgctttgccgttgaggtgaagggcaggattcacttcgacctctaccccgtcataaggcgcacgataaacctcccgacctacacccttgaggccgtttacgaggccgtctttggaaagcccaaggagaaggtttacgcagaggagatagcgcaggcctgggagagcggggagggccttgaaagggttgcaagatactcgatggaggacgctaaggtgacctacgagctgggaagggagttcttcccgatggaggcccagctttcgaggcttataggccagagcctctgggacgtctcgcgctcgagcaccggaaatttggtggagtggttcctcctgcggaaggcctacaagaggaacgagctcgccccaaacaagcccgacgagagggagctcgcgagacggcgcgggggctacgctggcgggtacgttaaggaaccagagcggggattgtgggacaacattgtgtatttagacttccgctcgctgtatccttcaatcatcataacccacaacgtctcgccggataccctcaaccgcgagggctgtaaagagtacgacgtcgcccctgaggttggacacaagttctgcaaggacttccccggcttcataccaagcctcctgggagatttgctcgaggagaggcagaagataaagcggaagatgaaggcaacggttgacccgctggagaagaaactcctcgtgtacaggcagtggcagataaaaatcctcgccaacagcttctacggctactacggctacgccaaggcccggtggtactgcaaggagtgcgccgagagcgttacggcctggggaagggagtatatagaaatggttatccgggaactcgaagaaaaattcggttttaaagttctctatgccgatacagacggtctccatgctaccattcccggagcagacgctgaaacagtcaagaaaaaagcaaaggagttcttaaaatacattaatccaaaactgcccggcctgctcgaacttgagtacgagggcttctacgtgaggggcttcttcgtcacgaagaagaagtacgctgtgatagacgaggagggcaagataaccacgaggggtcttgagattgtgaggcgcgactggagcgagatagcgaaggagacccaggccagggtcttagaggcgatactcaagcacggtgacgtcgaggaggccgttaggatagtcaaggaagtgacggaaaagctgagcaagtatgaggtcccgcccgagaagctggtaatccacgagcagataacgcgcgatttgagggattacaaagccaccggcccgcacgttgccgttgcgaagaggctcgcggcgcgtggagtgaaaatccggcccggcacggtgataagctacatcgtcctaaagggctctggaaggataggcgacagggcgattccagctgatgagttcgacccgacgaagcaccgctacgatgcggaatactacatcgagaaccaggttctcccggcggtggagaggattctaaaagccttcggctatcggaaggaggatttgcgctaccagaagacgaagcaggtcggctcgggcgcgtggctgaaggtgaaggggaagaagggtaccgaagcttacgtagaacaaaaactcatctcagaagaggatctgaatagcgccgtcgaccatcatcatcatcatcattga

SEQ ID NO: 296 - protein, 802 aa, Artificial Sequence
  Description of Artificial Sequence:Thermococcus species 9degreesN-7 mutant DNA polymerase, 9degreesN mutant
MILDTDYITENGKPVIRVFKKENGEFKIEYDRTFEPYFYALLKDDSAIEDVKKVTAKRHGTVVKVKRAEKVQKKFLGRPIEVWKLYFNHPQDVPAIRDRIRAHPAVVDIYEYDIPFAKRYLIDKGLIPMEGDEELTMLAFAIATLYHEGEEFGTGPILMISYADGSEARVITWKKIDLPYVDVVSTEKEMIKRFLRVVREKDPDVLITYNGDNFDFAYLKKRCEELGIKFTLGRDGSEPKIQRMGDRFAVEVKGRIHFDLYPVIRRTINLPTYTLEAVYEAVFGKPKEKVYAEEIAQAWESGEGLERVARYSMEDAKVTYELGREFFPMEAQLSRLIGQSLWDVSRSSTGNLVEWFLLRKAYKRNELAPNKPDERELARRRGGYAGGYVKEPERGLWDNIVYLDFRSLYPSIIITHNVSPDTLNREGCKEYDVAPEVGHKFCKDFPGFIPSLLGDLLEERQKIKRKMKATVDPLEKKLLVYRQWQIKILANSFYGYYGYAKARWYCKECAESVTAWGREYIEMVIRELEEKFGFKVLYADTDGLHATIPGADAETVKKKAKEFLKYINPKLPGLLELEYEGFYVRGFFVTKKKYAVIDEEGKITTRGLEIVRRDWSEIAKETQARVLEAILKHGDVEEAVRIVKEVTEKLSKYEVPPEKLVIHEQITRDLRDYKATGPHVAVAKRLAARGVKIRPGTVISYIVLKGSGRIGDRAIPADEFDPTKHRYDAEYYIENQVLPAVERILKAFGYRKEDLRYQKTKQVGSGAWLKVKGKKGTEAYVEQKLISEEDLNSAVDHHHHHH

SEQ ID NO: 297 - DNA, 2409 bp, Artificial Sequence
  Description of Artificial Sequence:Thermococcus species 9degreesN-7 mutant DNA polymerase, 9degreesN mutant
atgattctcgataccgactacatcaccgagaacgggaagcccgtgataagggtcttcaagaaggagaacggcgagtttaaaatcgagtacgacagaaccttcgagccctacttctacgcccttctgaaggacgattctgcgatagaggacgtcaagaaggtaaccgcaaagaggcacggaacggttgtcaaggtgaagcgcgccgagaaggtgcagaagaagttcctcggcaggccgatagaggtctggaagctctacttcaaccatcctcaggacgtcccggcgattcgagacaggatacgcgcccaccccgctgtcgttgacatctacgagtacgacatacccttcgccaagcgctacctcatcgacaagggcctgattccgatggagggcgacgaggagcttacgatgctcgccttcgcgatcgcaaccctctatcacgagggcgaggagttcggaaccgggccgattctcatgataagctacgccgacgggagcgaggcgagggtgataacctggaagaagattgaccttccgtacgttgacgtcgtctcgaccgagaaggagatgattaagcgcttcctccgcgtcgtcagggagaaggaccccgacgtgctcatcacctacaacggcgacaacttcgacttcgcctacctgaagaagcgctgtgaggaactcggaataaagttcacactcggcagggacgggagcgagccgaagatacagcgaatgggcgaccgctttgccgttgaggtgaagggcaggattcacttcgacctctaccccgtcataaggcgcacgataaacctcccgacctacacccttgaggccgtttacgaggccgtctttggaaagcccaaggagaaggtttacgcagaggagatagcgcaggcctgggagagcggggagggccttgaaagggttgcaagatactcgatggaggacgctaaggtgacctacgagctgggaagggagttcttcccgatggaggcccagctttcgaggcttataggccagagcctctgggacgtctcgcgctcgagcaccggaaatttggtggagtggttcctcctgcggaaggcctacaagaggaacgagctcgccccaaacaagcccgacgagagggagctcgcgagacggcgcgggggctacgctggcgggtacgttaaggaaccagagcggggattgtgggacaacattgtgtatttagacttccgctcgctgtatccttcaatcatcataacccacaacgtctcgccggataccctcaaccgcgagggctgtaaagagtacgacgtcgcccctgaggttggacacaagttctgcaaggacttccccggcttcataccaagcctcctgggagatttgctcgaggagaggcagaagataaagcggaagatgaaggcaacggttgacccgctggagaagaaactcctcgtgtacaggcagtggcttataaaaatcctcgccaacagcttctacggctactacggctacgccaaggccctctggtactgcaaggagtgcgccgagagcgttacggcctggggaagggagtatatagaaatggttatccgggaactcgaagaaaaattcggttttaaagttctctatgccgatacagacggtctccatgctaccattcccggagcagacgctgaaacagtcaagaaaaaagcaaaggagttcttaaaatacattaatccaaaactgcccggcctgctcgaacttgagtacgagggcttctacgtgaggggcttcttcgtcacgaagaagaagtacgctgtgatagacgaggagggcaagataaccacgaggggtcttgagattgtgaggcgcgactggagcgagatagcgaaggagacccaggccagggtcttagaggcgatactcaagcacggtgacgtcgaggaggccgttaggatagtcaaggaagtgacggaaaagctgagcaagtatgaggtcccgcccgagaagctggtaatccacgagcagataacgcgcgatttgagggattacaaagccaccggcccgcacgttgccgttgcgaagaggctcgcggcgcgtggagtgaaaatccggcccggcacggtgataagctacatcgtcctaaagggctctggaaggataggcgacagggcgattccagctgatgagttcgacccgacgaagcaccgctacgatgcggaatactacatcgagaaccaggttctcccggcggtggagaggattctaaaagccttcggctatcggaaggaggatttgcgctaccagaagacgaagcaggtcggctcgggcgcgtggctgaaggtgaaggggaagaagggtaccgaagcttacgtagaacaaaaactcatctcagaagaggatctgaatagcgccgtcgaccatcatcatcatcatcattga

SEQ ID NO: 298 - protein, 802 aa, Artificial Sequence
  Description of Artificial Sequence:Thermococcus species 9degreesN-7 mutant DNA polymerase, 9degreesN mutant
MILDTDYITENGKPVIRVFKKENGEFKIEYDRTFEPYFYALLKDDSAIEDVKKVTAKRHGTVVKVKRAEKVQKKFLGRPIEVWKLYFNHPQDVPAIRDRIRAHPAVVDIYEYDIPFAKRYLIDKGLIPMEGDEELTMLAFAIATLYHEGEEFGTGPILMISYADGSEARVITWKKIDLPYVDVVSTEKEMIKRFLRVVREKDPDVLITYNGDNFDFAYLKKRCEELGIKFTLGRDGSEPKIQRMGDRFAVEVKGRIHFDLYPVIRRTINLPTYTLEAVYEAVFGKPKEKVYAEEIAQAWESGEGLERVARYSMEDAKVTYELGREFFPMEAQLSRLIGQSLWDVSRSSTGNLVEWFLLRKAYKRNELAPNKPDERELARRRGGYAGGYVKEPERGLWDNIVYLDFRSLYPSIIITHNVSPDTLNREGCKEYDVAPEVGHKFCKDFPGFIPSLLGDLLEERQKIKRKMKATVDPLEKKLLVYRQWLIKILANSFYGYYGYAKALWYCKECAESVTAWGREYIEMVIRELEEKFGFKVLYADTDGLHATIPGADAETVKKKAKEFLKYINPKLPGLLELEYEGFYVRGFFVTKKKYAVIDEEGKITTRGLEIVRRDWSEIAKETQARVLEAILKHGDVEEAVRIVKEVTEKLSKYEVPPEKLVIHEQITRDLRDYKATGPHVAVAKRLAARGVKIRPGTVISYIVLKGSGRIGDRAIPADEFDPTKHRYDAEYYIENQVLPAVERILKAFGYRKEDLRYQKTKQVGSGAWLKVKGKKGTEAYVEQKLISEEDLNSAVDHHHHHH

SEQ ID NO: 299 - DNA, 2409 bp, Artificial Sequence
  Description of Artificial Sequence:Thermococcus species 9degreesN-7 mutant DNA polymerase, 9degreesN mutant
atgattctcgataccgactacatcaccgagaacgggaagcccgtgataagggtcttcaagaaggagaacggcgagtttaaaatcgagtacgacagaaccttcgagccctacttctacgcccttctgaaggacgattctgcgatagaggacgtcaagaaggtaaccgcaaagaggcacggaacggttgtcaaggtgaagcgcgccgagaaggtgcagaagaagttcctcggcaggccgatagaggtctggaagctctacttcaaccatcctcaggacgtcccggcgattcgagacaggatacgcgcccaccccgctgtcgttgacatctacgagtacgacatacccttcgccaagcgctacctcatcgacaagggcctgattccgatggagggcgacgaggagcttacgatgctcgccttcgcgatcgcaaccctctatcacgagggcgaggagttcggaaccgggccgattctcatgataagctacgccgacgggagcgaggcgagggtgataacctggaagaagattgaccttccgtacgttgacgtcgtctcgaccgagaaggagatgattaagcgcttcctccgcgtcgtcagggagaaggaccccgacgtgctcatcacctacaacggcgacaacttcgacttcgcctacctgaagaagcgctgtgaggaactcggaataaagttcacactcggcagggacgggagcgagccgaagatacagcgaatgggcgaccgctttgccgttgaggtgaagggcaggattcacttcgacctctaccccgtcataaggcgcacgataaacctcccgacctacacccttgaggccgtttacgaggccgtctttggaaagcccaaggagaaggtttacgcagaggagatagcgcaggcctgggagagcggggagggccttgaaagggttgcaagatactcgatggaggacgctaaggtgacctacgagctgggaagggagttcttcccgatggaggcccagctttcgaggcttataggccagagcctctgggacgtctcgcgctcgagcaccggaaatttggtggagtggttcctcctgcggaaggcctacaagaggaacgagctcgccccaaacaagcccgacgagagggagctcgcgagacggcgcgggggctacgctggcgggtacgttaaggaaccagagcggggattgtgggacaacattgtgtatttagacttccgctcgctgtatccttcaatcatcataacccacaacgtctcgccggataccctcaaccgcgagggctgtaaagagtacgacgtcgcccctgaggttggacacaagttctgcaaggacttccccggcttcataccacccctcctgggagatttgctcgaggagaggcagaagataaagcggaagatgaaggcaacggttgacccgctggagaagaaactcctcgtgtacaggcagtggcttataaaaatcctcgccaacagcttctacggctactacggctacgccaaggcccggtggtactgcaaggagtgcgccgagagcgttacggcctggggaagggagtatatagaaatggttatccgggaactcgaagaaaaattcggttttaaagttctctatgccgatacagacggtctccatgctaccattcccggagcagacgctgaaacagtcaagaaaaaagcaaaggagttcttaaaatacattaatccaaaactgcccggcctgctcgaacttgagtacgagggcttctacgtgaggggcttcttcgtcacgaagaagaagtacgctgtgatagacgaggagggcaagataaccacgaggggtcttgagattgtgaggcgcgactggagcgagatagcgaaggagacccaggccagggtcttagaggcgatactcaagcacggtgacgtcgaggaggccgttaggatagtcaaggaagtgacggaaaagctgagcaagtatgaggtcccgcccgagaagctggtaatccacgagcagataacgcgcgatttgagggattacaaagccaccggcccgcacgttgccgttgcgaagaggctcgcggcgcgtggagtgaaaatccggcccggcacggtgataagctacatcgtcctaaagggctctggaaggataggcgacagggcgattccagctgatgagttcgacccgacgaagcaccgctacgatgcggaatactacatcgagaaccaggttctcccggcggtggagaggattctaaaagccttcggctatcggaaggaggatttgcgctaccagaagacgaagcaggtcggctcgggcgcgtggctgaaggtgaaggggaagaagggtaccgaagcttacgtagaacaaaaactcatctcagaagaggatctgaatagcgccgtcgaccatcatcatcatcatcattga

SEQ ID NO: 300 - protein, 802 aa, Artificial Sequence
  Description of Artificial Sequence:Thermococcus species 9degreesN-7 mutant DNA polymerase, 9degreesN mutant
MILDTDYITENGKPVIRVFKKENGEFKIEYDRTFEPYFYALLKDDSAIEDVKKVTAKRHGTVVKVKRAEKVQKKFLGRPIEVWKLYFNHPQDVPAIRDRIRAHPAVVDIYEYDIPFAKRYLIDKGLIPMEGDEELTMLAFAIATLYHEGEEFGTGPILMISYADGSEARVITWKKIDLPYVDVVSTEKEMIKRFLRVVREKDPDVLITYNGDNFDFAYLKKRCEELGIKFTLGRDGSEPKIQRMGDRFAVEVKGRIHFDLYPVIRRTINLPTYTLEAVYEAVFGKPKEKVYAEEIAQAWESGEGLERVARYSMEDAKVTYELGREFFPMEAQLSRLIGQSLWDVSRSSTGNLVEWFLLRKAYKRNELAPNKPDERELARRRGGYAGGYVKEPERGLWDNIVYLDFRSLYPSIIITHNVSPDTLNREGCKEYDVAPEVGHKFCKDFPGFIPPLLGDLLEERQKIKRKMKATVDPLEKKLLVYRQWLIKILANSFYGYYGYAKARWYCKECAESVTAWGREYIEMVIRELEEKFGFKVLYADTDGLHATIPGADAETVKKKAKEFLKYINPKLPGLLELEYEGFYVRGFFVTKKKYAVIDEEGKITTRGLEIVRRDWSEIAKETQARVLEAILKHGDVEEAVRIVKEVTEKLSKYEVPPEKLVIHEQITRDLRDYKATGPHVAVAKRLAARGVKIRPGTVISYIVLKGSGRIGDRAIPADEFDPTKHRYDAEYYIENQVLPAVERILKAFGYRKEDLRYQKTKQVGSGAWLKVKGKKGTEAYVEQKLISEEDLNSAVDHHHHHH

SEQ ID NO: 301 - DNA, 2409 bp, Artificial Sequence
  Description of Artificial Sequence:Thermococcus species 9degreesN-7 mutant DNA polymerase, 9degreesN mutant
atgattctcgataccgactacatcaccgagaacgggaagcccgtgataagggtcttcaagaaggagaacggcgagtttaaaatcgagtacgacagaaccttcgagccctacttctacgcccttctgaaggacgattctgcgatagaggacgtcaagaaggtaaccgcaaagaggcacggaacggttgtcaaggtgaagcgcgccgagaaggtgcagaagaagttcctcggcaggccgatagaggtctggaagctctacttcaaccatcctcaggacgtcccggcgattcgagacaggatacgcgcccaccccgctgtcgttgacatctacgagtacgacatacccttcgccaagcgctacctcatcgacaagggcctgattccgatggagggcgacgaggagcttacgatgctcgccttcgcgatcgcaaccctctatcacgagggcgaggagttcggaaccgggccgattctcatgataagctacgccgacgggagcgaggcgagggtgataacctggaagaagattgaccttccgtacgttgacgtcgtctcgaccgagaaggagatgattaagcgcttcctccgcgtcgtcagggagaaggaccccgacgtgctcatcacctacaacggcgacaacttcgacttcgcctacctgaagaagcgctgtgaggaactcggaataaagttcacactcggcagggacgggagcgagccgaagatacagcgaatgggcgaccgctttgccgttgaggtgaagggcaggattcacttcgacctctaccccgtcataaggcgcacgataaacctcccgacctacacccttgaggccgtttacgaggccgtctttggaaagcccaaggagaaggtttacgcagaggagatagcgcaggcctgggagagcggggagggccttgaaagggttgcaagatactcgatggaggacgctaaggtgacctacgagctgggaagggagttcttcccgatggaggcccagctttcgaggcttataggccagagcctctgggacgtctcgcgctcgagcaccggaaatttggtggagtggttcctcctgcggaaggcctacaagaggaacgagctcgccccaaacaagcccgacgagagggagctcgcgagacggcgcgggggctacgctggcgggtacgttaaggaaccagagcggggattgtgggacaacattgtgtatttagacttccgctcgtggtatccttcaatcatcataacccacaacgtctcgccggataccctcaaccgcgagggctgtaaagagtacgacgtcgcccctgaggttggacacaagttctgcaaggacttccccggcttcataccaagcctcctgggagatttgctcgaggagaggcagaagataaagcggaagatgaaggcaacggttgacccgctggagaagaaactcctcgattacaggatgtggcttataaaaatcctcactaacagcttctacggctactacggctacgccaaggcccggtggtactgcaaggagtgcgccgagagcgttacggcctggggaagggagtatatagaaatggttatccgggaactcgaagaaaaattcggttttaaagttctctatgccgatacagacggtctccatgctaccattcccggagcagacgctgaaacagtcaagaaaaaagcaaaggagttcttaaaatacattaatccaaaactgcccggcctgctcgaacttgagtacgagggcttctacgtgaggggcttcttcgtcacgaagaagaagtacgctgtgatagacgaggagggcaagataaccacgaggggtcttgagattgtgaggcgcgactggagcgagatagcgaaggagacccaggccagggtcttagaggcgatactcaagcacggtgacgtcgaggaggccgttaggatagtcaaggaagtgacggaaaagctgagcaagtatgaggtcccgcccgagaagctggtaatccacgagcagataacgcgcgatttgagggattacaaagccaccggcccgcacgttgccgttgcgaagaggctcgcggcgcgtggagtgaaaatccggcccggcacggtgataagctacatcgtcctaaagggctctggaaggataggcgacagggcgattccagctgatgagttcgacccgacgaagcaccgctacgatgcggaatactacatcgagaaccaggttctcccggcggtggagaggattctaaaagccttcggctatcggaaggaggatttgcgctaccagaagacgaagcaggtcggctcgggcgcgtggctgaaggtgaaggggaagaagggtaccgaagcttacgtagaacaaaaactcatctcagaagaggatctgaatagcgccgtcgaccatcatcatcatcatcattga

SEQ ID NO: 302 - protein, 802 aa, Artificial Sequence
  Description of Artificial Sequence:Thermococcus species 9degreesN-7 mutant DNA polymerase, 9degreesN mutant
MILDTDYITENGKPVIRVFKKENGEFKIEYDRTFEPYFYALLKDDSAIEDVKKVTAKRHGTVVKVKRAEKVQKKFLGRPIEVWKLYFNHPQDVPAIRDRIRAHPAVVDIYEYDIPFAKRYLIDKGLIPMEGDEELTMLAFAIATLYHEGEEFGTGPILMISYADGSEARVITWKKIDLPYVDVVSTEKEMIKRFLRVVREKDPDVLITYNGDNFDFAYLKKRCEELGIKFTLGRDGSEPKIQRMGDRFAVEVKGRIHFDLYPVIRRTINLPTYTLEAVYEAVFGKPKEKVYAEEIAQAWESGEGLERVARYSMEDAKVTYELGREFFPMEAQLSRLIGQSLWDVSRSSTGNLVEWFLLRKAYKRNELAPNKPDERELARRRGGYAGGYVKEPERGLWDNIVYLDFRSWYPSIIITHNVSPDTLNREGCKEYDVAPEVGHKFCKDFPGFIPSLLGDLLEERQKIKRKMKATVDPLEKKLLDYRMWLIKILTNSFYGYYGYAKARWYCKECAESVTAWGREYIEMVIRELEEKFGFKVLYADTDGLHATIPGADAETVKKKAKEFLKYINPKLPGLLELEYEGFYVRGFFVTKKKYAVIDEEGKITTRGLEIVRRDWSEIAKETQARVLEAILKHGDVEEAVRIVKEVTEKLSKYEVPPEKLVIHEQITRDLRDYKATGPHVAVAKRLAARGVKIRPGTVISYIVLKGSGRIGDRAIPADEFDPTKHRYDAEYYIENQVLPAVERILKAFGYRKEDLRYQKTKQVGSGAWLKVKGKKGTEAYVEQKLISEEDLNSAVDHHHHHH

SEQ ID NO: 303 - DNA, 2409 bp, Artificial Sequence
  Description of Artificial Sequence:Thermococcus species 9degreesN-7 mutant DNA polymerase, 9degreesN mutant
atgattctcgataccgactacatcaccgagaacgggaagcccgtgataagggtcttcaagaaggagaacggcgagtttaaaatcgagtacgacagaaccttcgagccctacttctacgcccttctgaaggacgattctgcgatagaggacgtcaagaaggtaaccgcaaagaggcacggaacggttgtcaaggtgaagcgcgccgagaaggtgcagaagaagttcctcggcaggccgatagaggtctggaagctctacttcaaccatcctcaggacgtcccggcgattcgagacaggatacgcgcccaccccgctgtcgttgacatctacgagtacgacatacccttcgccaagcgctacctcatcgacaagggcctgattccgatggagggcgacgaggagcttacgatgctcgccttcgcgatcgcaaccctctatcacgagggcgaggagttcggaaccgggccgattctcatgataagctacgccgacgggagcgaggcgagggtgataacctggaagaagattgaccttccgtacgttgacgtcgtctcgaccgagaaggagatgattaagcgcttcctccgcgtcgtcagggagaaggaccccgacgtgctcatcacctacaacggcgacaacttcgacttcgcctacctgaagaagcgctgtgaggaactcggaataaagttcacactcggcagggacgggagcgagccgaagatacagcgaatgggcgaccgctttgccgttgaggtgaagggcaggattcacttcgacctctaccccgtcataaggcgcacgataaacctcccgacctacacccttgaggccgtttacgaggccgtctttggaaagcccaaggagaaggtttacgcagaggagatagcgcaggcctgggagagcggggagggccttgaaagggttgcaagatactcgatggaggacgctaaggtgacctacgagctgggaagggagttcttcccgatggaggcccagctttcgaggcttataggccagagcctctgggacgtctcgcgctcgagcaccggaaatttggtggagtggttcctcctgcggaaggcctacaagaggaacgagctcgccccaaacaagcccgacgagagggagctcgcgagacggcgcgggggctacgctggcgggtacgttaaggaaccagagcggggattgtgggacaacattgtgtatttagacttccgctcgtggtatccttcaatcatcataacccacaacgtctcgccggataccctcaaccgcgagggctgtaaagagtacgacgtcgcccctgaggttggacacaagttctgcaaggacttccccggcaaaataccaagcctcctgggagatttgctcgaggagaggcagaagataaagcggaagatgaaggcaacggttgacccgctggagaagaaactcctcgattacaggatgtggcttataaaaatcctcgccaacagcttctacggctactacggctacgccaaggcccggtggtactgcaaggagtgcgccgagagcgttacggcctggggaagggagtatatagaaatggttatccgggaactcgaagaaaaattcggttttaaagttctctatgccgatacagacggtctccatgctaccattcccggagcagacgctgaaacagtcaagaaaaaagcaaaggagttcttaaaatacattaatccaaaactgcccggcctgctcgaacttgagtacgagggcttctacgtgaggggcttcttcgtcacgaagaagaagtacgctgtgatagacgaggagggcaagataaccacgaggggtcttgagattgtgaggcgcgactggagcgagatagcgaaggagacccaggccagggtcttagaggcgatactcaagcacggtgacgtcgaggaggccgttaggatagtcaaggaagtgacggaaaagctgagcaagtatgaggtcccgcccgagaagctggtaatccacgagcagataacgcgcgatttgagggattacaaagccaccggcccgcacgttgccgttgcgaagaggctcgcggcgcgtggagtgaaaatccggcccggcacggtgataagctacatcgtcctaaagggctctggaaggataggcgacagggcgattccagctgatgagttcgacccgacgaagcaccgctacgatgcggaatactacatcgagaaccaggttctcccggcggtggagaggattctaaaagccttcggctatcggaaggaggatttgcgctaccagaagacgaagcaggtcggctcgggcgcgtggctgaaggtgaaggggaagaagggtaccgaagcttacgtagaacaaaaactcatctcagaagaggatctgaatagcgccgtcgaccatcatcatcatcatcattga

SEQ ID NO: 304 - protein, 802 aa, Artificial Sequence
  Description of Artificial Sequence:Thermococcus species 9degreesN-7 mutant DNA polymerase, 9degreesN mutant
MILDTDYITENGKPVIRVFKKENGEFKIEYDRTFEPYFYALLKDDSAIEDVKKVTAKRHGTVVKVKRAEKVQKKFLGRPIEVWKLYFNHPQDVPAIRDRIRAHPAVVDIYEYDIPFAKRYLIDKGLIPMEGDEELTMLAFAIATLYHEGEEFGTGPILMISYADGSEARVITWKKIDLPYVDVVSTEKEMIKRFLRVVREKDPDVLITYNGDNFDFAYLKKRCEELGIKFTLGRDGSEPKIQRMGDRFAVEVKGRIHFDLYPVIRRTINLPTYTLEAVYEAVFGKPKEKVYAEEIAQAWESGEGLERVARYSMEDAKVTYELGREFFPMEAQLSRLIGQSLWDVSRSSTGNLVEWFLLRKAYKRNELAPNKPDERELARRRGGYAGGYVKEPERGLWDNIVYLDFRSWYPSIIITHNVSPDTLNREGCKEYDVAPEVGHKFCKDFPGKIPSLLGDLLEERQKIKRKMKATVDPLEKKLLDYRMWLIKILANSFYGYYGYAKARWYCKECAESVTAWGREYIEMVIRELEEKFGFKVLYADTDGLHATIPGADAETVKKKAKEFLKYINPKLPGLLELEYEGFYVRGFFVTKKKYAVIDEEGKITTRGLEIVRRDWSEIAKETQARVLEAILKHGDVEEAVRIVKEVTEKLSKYEVPPEKLVIHEQITRDLRDYKATGPHVAVAKRLAARGVKIRPGTVISYIVLKGSGRIGDRAIPADEFDPTKHRYDAEYYIENQVLPAVERILKAFGYRKEDLRYQKTKQVGSGAWLKVKGKKGTEAYVEQKLISEEDLNSAVDHHHHHH

SEQ ID NO: 305 - DNA, 2409 bp, Artificial Sequence
  Description of Artificial Sequence:Thermococcus species 9degreesN-7 mutant DNA polymerase, 9degreesN mutant
atgattctcgataccgactacatcaccgagaacgggaagcccgtgataagggtcttcaagaaggagaacggcgagtttaaaatcgagtacgacagaaccttcgagccctacttctacgcccttctgaaggacgattctgcgatagaggacgtcaagaaggtaaccgcaaagaggcacggaacggttgtcaaggtgaagcgcgccgagaaggtgcagaagaagttcctcggcaggccgatagaggtctggaagctctacttcaaccatcctcaggacgtcccggcgattcgagacaggatacgcgcccaccccgctgtcgttgacatctacgagtacgacatacccttcgccaagcgctacctcatcgacaagggcctgattccgatggagggcgacgaggagcttacgatgctcgccttcgcgatcgcaaccctctatcacgagggcgaggagttcggaaccgggccgattctcatgataagctacgccgacgggagcgaggcgagggtgataacctggaagaagattgaccttccgtacgttgacgtcgtctcgaccgagaaggagatgattaagcgcttcctccgcgtcgtcagggagaaggaccccgacgtgctcatcacctacaacggcgacaacttcgacttcgcctacctgaagaagcgctgtgaggaactcggaataaagttcacactcggcagggacgggagcgagccgaagatacagcgaatgggcgaccgctttgccgttgaggtgaagggcaggattcacttcgacctctaccccgtcataaggcgcacgataaacctcccgacctacacccttgaggccgtttacgaggccgtctttggaaagcccaaggagaaggtttacgcagaggagatagcgcaggcctgggagagcggggagggccttgaaagggttgcaagatactcgatggaggacgctaaggtgacctacgagctgggaagggagttcttcccgatggaggcccagctttcgaggcttataggccagagcctctgggacgtctcgcgctcgagcaccggaaatttggtggagtggttcctcctgcggaaggcctacaagaggaacgagctcgccccaaacaagcccgacgagagggagctcgcgagacggcgcgggggctacgctggcgggtacgttaaggaaccagagcggggattgtgggacaacattgtgtatttagacttccgctcgtggtatccttcaatcatcataacccacaacgtctcgccggataccctcaaccgcgagggctgtaaagagtacgacgtcgcccctgaggttggacacaagttctgcaaggacttccccggcttcataccaagcctcctgggagatttgctcgaggagaggcagaagataaagcggaagatgaaggcaacggttgacccgctggagaagaaactcctcgattacaggatgtggcttataaaaatcctcgccaacagcatgtacggctactacggctacgccaaggcccggtggtactgcaaggagtgcgccgagagcgttacggcctggggaagggagtatatagaaatggttatccgggaactcgaagaaaaattcggttttaaagttctctatgccgatacagacggtctccatgctaccattcccggagcagacgctgaaacagtcaagaaaaaagcaaaggagttcttaaaatacattaatccaaaactgcccggcctgctcgaacttgagtacgagggcttctacgtgaggggcttcttcgtcacgaagaagaagtacgctgtgatagacgaggagggcaagataaccacgaggggtcttgagattgtgaggcgcgactggagcgagatagcgaaggagacccaggccagggtcttagaggcgatactcaagcacggtgacgtcgaggaggccgttaggatagtcaaggaagtgacggaaaagctgagcaagtatgaggtcccgcccgagaagctggtaatccacgagcagataacgcgcgatttgagggattacaaagccaccggcccgcacgttgccgttgcgaagaggctcgcggcgcgtggagtgaaaatccggcccggcacggtgataagctacatcgtcctaaagggctctggaaggataggcgacagggcgattccagctgatgagttcgacccgacgaagcaccgctacgatgcggaatactacatcgagaaccaggttctcccggcggtggagaggattctaaaagccttcggctatcggaaggaggatttgcgctaccagaagacgaagcaggtcggctcgggcgcgtggctgaaggtgaaggggaagaagggtaccgaagcttacgtagaacaaaaactcatctcagaagaggatctgaatagcgccgtcgaccatcatcatcatcatcattga

SEQ ID NO: 306 - protein, 802 aa, Artificial Sequence
  Description of Artificial Sequence:Thermococcus species 9degreesN-7 mutant DNA polymerase, 9degreesN mutant
MILDTDYITENGKPVIRVFKKENGEFKIEYDRTFEPYFYALLKDDSAIEDVKKVTAKRHGTVVKVKRAEKVQKKFLGRPIEVWKLYFNHPQDVPAIRDRIRAHPAVVDIYEYDIPFAKRYLIDKGLIPMEGDEELTMLAFAIATLYHEGEEFGTGPILMISYADGSEARVITWKKIDLPYVDVVSTEKEMIKRFLRVVREKDPDVLITYNGDNFDFAYLKKRCEELGIKFTLGRDGSEPKIQRMGDRFAVEVKGRIHFDLYPVIRRTINLPTYTLEAVYEAVFGKPKEKVYAEEIAQAWESGEGLERVARYSMEDAKVTYELGREFFPMEAQLSRLIGQSLWDVSRSSTGNLVEWFLLRKAYKRNELAPNKPDERELARRRGGYAGGYVKEPERGLWDNIVYLDFRSWYPSIIITHNVSPDTLNREGCKEYDVAPEVGHKFCKDFPGFIPSLLGDLLEERQKIKRKMKATVDPLEKKLLDYRMWLIKILANSMYGYYGYAKARWYCKECAESVTAWGREYIEMVIRELEEKFGFKVLYADTDGLHATIPGADAETVKKKAKEFLKYINPKLPGLLELEYEGFYVRGFFVTKKKYAVIDEEGKITTRGLEIVRRDWSEIAKETQARVLEAILKHGDVEEAVRIVKEVTEKLSKYEVPPEKLVIHEQITRDLRDYKATGPHVAVAKRLAARGVKIRPGTVISYIVLKGSGRIGDRAIPADEFDPTKHRYDAEYYIENQVLPAVERILKAFGYRKEDLRYQKTKQVGSGAWLKVKGKKGTEAYVEQKLISEEDLNSAVDHHHHHH

SEQ ID NO: 307 - DNA, 2409 bp, Artificial Sequence
  Description of Artificial Sequence:Thermococcus species 9degreesN-7 mutant DNA polymerase, 9degreesN mutant
atgattctcgataccgactacatcaccgagaacgggaagcccgtgataagggtcttcaagaaggagaacggcgagtttaaaatcgagtacgacagaaccttcgagccctacttctacgcccttctgaaggacgattctgcgatagaggacgtcaagaaggtaaccgcaaagaggcacggaacggttgtcaaggtgaagcgcgccgagaaggtgcagaagaagttcctcggcaggccgatagaggtctggaagctctacttcaaccatcctcaggacgtcccggcgattcgagacaggatacgcgcccaccccgctgtcgttgacatctacgagtacgacatacccttcgccaagcgctacctcatcgacaagggcctgattccgatggagggcgacgaggagcttacgatgctcgccttcgcgatcgcaaccctctatcacgagggcgaggagttcggaaccgggccgattctcatgataagctacgccgacgggagcgaggcgagggtgataacctggaagaagattgaccttccgtacgttgacgtcgtctcgaccgagaaggagatgattaagcgcttcctccgcgtcgtcagggagaaggaccccgacgtgctcatcacctacaacggcgacaacttcgacttcgcctacctgaagaagcgctgtgaggaactcggaataaagttcacactcggcagggacgggagcgagccgaagatacagcgaatgggcgaccgctttgccgttgaggtgaagggcaggattcacttcgacctctaccccgtcataaggcgcacgataaacctcccgacctacacccttgaggccgtttacgaggccgtctttggaaagcccaaggagaaggtttacgcagaggagatagcgcaggcctgggagagcggggagggccttgaaagggttgcaagatactcgatggaggacgctaaggtgacctacgagctgggaagggagttcttcccgatggaggcccagctttcgaggcttataggccagagcctctgggacgtctcgcgctcgagcaccggaaatttggtggagtggttcctcctgcggaaggcctacaagaggaacgagctcgccccaaacaagcccgacgagagggagctcgcgagacggcgcgggggctacgctggcgggtacgttaaggaaccagagcggggattgtgggacaacattgtgtatttagacttccgctcgtggtatccttcaatcatcataacccacaacgtctcgccggataccctcaaccgcgagggctgtaaagagtacgacgtcgcccctgaggttggacacaagttctgcaaggacttccccggcttcataccaagcctcctgggagatttgctcgaggagaggcagaagataaagcggaagatgaaggcaacggttgacccgctggagaagaaactcctcgattacaggatgtggcttataaaaatcctcgccaacagcctatacggctactacggctacgccaaggcccggtggtactgcaaggagtgcgccgagagcgttacggcctggggaagggagtatatagaaatggttatccgggaactcgaagaaaaattcggttttaaagttctctatgccgatacagacggtctccatgctaccattcccggagcagacgctgaaacagtcaagaaaaaagcaaaggagttcttaaaatacattaatccaaaactgcccggcctgctcgaacttgagtacgagggcttctacgtgaggggcttcttcgtcacgaagaagaagtacgctgtgatagacgaggagggcaagataaccacgaggggtcttgagattgtgaggcgcgactggagcgagatagcgaaggagacccaggccagggtcttagaggcgatactcaagcacggtgacgtcgaggaggccgttaggatagtcaaggaagtgacggaaaagctgagcaagtatgaggtcccgcccgagaagctggtaatccacgagcagataacgcgcgatttgagggattacaaagccaccggcccgcacgttgccgttgcgaagaggctcgcggcgcgtggagtgaaaatccggcccggcacggtgataagctacatcgtcctaaagggctctggaaggataggcgacagggcgattccagctgatgagttcgacccgacgaagcaccgctacgatgcggaatactacatcgagaaccaggttctcccggcggtggagaggattctaaaagccttcggctatcggaaggaggatttgcgctaccagaagacgaagcaggtcggctcgggcgcgtggctgaaggtgaaggggaagaagggtaccgaagcttacgtagaacaaaaactcatctcagaagaggatctgaatagcgccgtcgaccatcatcatcatcatcattga

SEQ ID NO: 308 - protein, 802 aa, Artificial Sequence
  Description of Artificial Sequence:Thermococcus species 9degreesN-7 mutant DNA polymerase, 9degreesN mutant
MILDTDYITENGKPVIRVFKKENGEFKIEYDRTFEPYFYALLKDDSAIEDVKKVTAKRHGTVVKVKRAEKVQKKFLGRPIEVWKLYFNHPQDVPAIRDRIRAHPAVVDIYEYDIPFAKRYLIDKGLIPMEGDEELTMLAFAIATLYHEGEEFGTGPILMISYADGSEARVITWKKIDLPYVDVVSTEKEMIKRFLRVVREKDPDVLITYNGDNFDFAYLKKRCEELGIKFTLGRDGSEPKIQRMGDRFAVEVKGRIHFDLYPVIRRTINLPTYTLEAVYEAVFGKPKEKVYAEEIAQAWESGEGLERVARYSMEDAKVTYELGREFFPMEAQLSRLIGQSLWDVSRSSTGNLVEWFLLRKAYKRNELAPNKPDERELARRRGGYAGGYVKEPERGLWDNIVYLDFRSWYPSIIITHNVSPDTLNREGCKEYDVAPEVGHKFCKDFPGFIPSLLGDLLEERQKIKRKMKATVDPLEKKLLDYRMWLIKILANSLYGYYGYAKARWYCKECAESVTAWGREYIEMVIRELEEKFGFKVLYADTDGLHATIPGADAETVKKKAKEFLKYINPKLPGLLELEYEGFYVRGFFVTKKKYAVIDEEGKITTRGLEIVRRDWSEIAKETQARVLEAILKHGDVEEAVRIVKEVTEKLSKYEVPPEKLVIHEQITRDLRDYKATGPHVAVAKRLAARGVKIRPGTVISYIVLKGSGRIGDRAIPADEFDPTKHRYDAEYYIENQVLPAVERILKAFGYRKEDLRYQKTKQVGSGAWLKVKGKKGTEAYVEQKLISEEDLNSAVDHHHHHH

SEQ ID NO: 309 - DNA, 2409 bp, Artificial Sequence
  Description of Artificial Sequence:Thermococcus species 9degreesN-7 mutant DNA polymerase, 9degreesN mutant
atgattctcgataccgactacatcaccgagaacgggaagcccgtgataagggtcttcaagaaggagaacggcgagtttaaaatcgagtacgacagaaccttcgagccctacttctacgcccttctgaaggacgattctgcgatagaggacgtcaagaaggtaaccgcaaagaggcacggaacggttgtcaaggtgaagcgcgccgagaaggtgcagaagaagttcctcggcaggccgatagaggtctggaagctctacttcaaccatcctcaggacgtcccggcgattcgagacaggatacgcgcccaccccgctgtcgttgacatctacgagtacgacatacccttcgccaagcgctacctcatcgacaagggcctgattccgatggagggcgacgaggagcttacgatgctcgccttcgcgatcgcaaccctctatcacgagggcgaggagttcggaaccgggccgattctcatgataagctacgccgacgggagcgaggcgagggtgataacctggaagaagattgaccttccgtacgttgacgtcgtctcgaccgagaaggagatgattaagcgcttcctccgcgtcgtcagggagaaggaccccgacgtgctcatcacctacaacggcgacaacttcgacttcgcctacctgaagaagcgctgtgaggaactcggaataaagttcacactcggcagggacgggagcgagccgaagatacagcgaatgggcgaccgctttgccgttgaggtgaagggcaggattcacttcgacctctaccccgtcataaggcgcacgataaacctcccgacctacacccttgaggccgtttacgaggccgtctttggaaagcccaaggagaaggtttacgcagaggagatagcgcaggcctgggagagcggggagggccttgaaagggttgcaagatactcgatggaggacgctaaggtgacctacgagctgggaagggagttcttcccgatggaggcccagctttcgaggcttataggccagagcctctgggacgtctcgcgctcgagcaccggaaatttggtggagtggttcctcctgcggaaggcctacaagaggaacgagctcgccccaaacaagcccgacgagagggagctcgcgagacggcgcgggggctacgctggcgggtacgttaaggaaccagagcggggattgtgggacaacattgtgtatttagacttccgctcgtggtatccttcaatcatcataacccacaacgtctcgccggataccctcaaccgcgagggctgtaaagagtacgacgtcgcccctgaggttggacacaagttctgcaaggacttccccggcttcataccaagcctcctgggagatttgctcgaggagaggcagaagataaagcggaagatgaaggcaacggttgacccgctggagaagaaactcctcgattacaggatgtggcttataaaaatcctcgccaacagccactacggctactacggctacgccaaggcccggtggtactgcaaggagtgcgccgagagcgttacggcctggggaagggagtatatagaaatggttatccgggaactcgaagaaaaattcggttttaaagttctctatgccgatacagacggtctccatgctaccattcccggagcagacgctgaaacagtcaagaaaaaagcaaaggagttcttaaaatacattaatccaaaactgcccggcctgctcgaacttgagtacgagggcttctacgtgaggggcttcttcgtcacgaagaagaagtacgctgtgatagacgaggagggcaagataaccacgaggggtcttgagattgtgaggcgcgactggagcgagatagcgaaggagacccaggccagggtcttagaggcgatactcaagcacggtgacgtcgaggaggccgttaggatagtcaaggaagtgacggaaaagctgagcaagtatgaggtcccgcccgagaagctggtaatccacgagcagataacgcgcgatttgagggattacaaagccaccggcccgcacgttgccgttgcgaagaggctcgcggcgcgtggagtgaaaatccggcccggcacggtgataagctacatcgtcctaaagggctctggaaggataggcgacagggcgattccagctgatgagttcgacccgacgaagcaccgctacgatgcggaatactacatcgagaaccaggttctcccggcggtggagaggattctaaaagccttcggctatcggaaggaggatttgcgctaccagaagacgaagcaggtcggctcgggcgcgtggctgaaggtgaaggggaagaagggtaccgaagcttacgtagaacaaaaactcatctcagaagaggatctgaatagcgccgtcgaccatcatcatcatcatcattga

SEQ ID NO: 310 - protein, 802 aa, Artificial Sequence
  Description of Artificial Sequence:Thermococcus species 9degreesN-7 mutant DNA polymerase, 9degreesN mutant
MILDTDYITENGKPVIRVFKKENGEFKIEYDRTFEPYFYALLKDDSAIEDVKKVTAKRHGTVVKVKRAEKVQKKFLGRPIEVWKLYFNHPQDVPAIRDRIRAHPAVVDIYEYDIPFAKRYLIDKGLIPMEGDEELTMLAFAIATLYHEGEEFGTGPILMISYADGSEARVITWKKIDLPYVDVVSTEKEMIKRFLRVVREKDPDVLITYNGDNFDFAYLKKRCEELGIKFTLGRDGSEPKIQRMGDRFAVEVKGRIHFDLYPVIRRTINLPTYTLEAVYEAVFGKPKEKVYAEEIAQAWESGEGLERVARYSMEDAKVTYELGREFFPMEAQLSRLIGQSLWDVSRSSTGNLVEWFLLRKAYKRNELAPNKPDERELARRRGGYAGGYVKEPERGLWDNIVYLDFRSWYPSIIITHNVSPDTLNREGCKEYDVAPEVGHKFCKDFPGFIPSLLGDLLEERQKIKRKMKATVDPLEKKLLDYRMWLIKILANSHYGYYGYAKARWYCKECAESVTAWGREYIEMVIRELEEKFGFKVLYADTDGLHATIPGADAETVKKKAKEFLKYINPKLPGLLELEYEGFYVRGFFVTKKKYAVIDEEGKITTRGLEIVRRDWSEIAKETQARVLEAILKHGDVEEAVRIVKEVTEKLSKYEVPPEKLVIHEQITRDLRDYKATGPHVAVAKRLAARGVKIRPGTVISYIVLKGSGRIGDRAIPADEFDPTKHRYDAEYYIENQVLPAVERILKAFGYRKEDLRYQKTKQVGSGAWLKVKGKKGTEAYVEQKLISEEDLNSAVDHHHHHH

SEQ ID NO: 311 - DNA, 2409 bp, Artificial Sequence
  Description of Artificial Sequence:Thermococcus species 9degreesN-7 mutant DNA polymerase, 9degreesN mutant
atgattctcgataccgactacatcaccgagaacgggaagcccgtgataagggtcttcaagaaggagaacggcgagtttaaaatcgagtacgacagaaccttcgagccctacttctacgcccttctgaaggacgattctgcgatagaggacgtcaagaaggtaaccgcaaagaggcacggaacggttgtcaaggtgaagcgcgccgagaaggtgcagaagaagttcctcggcaggccgatagaggtctggaagctctacttcaaccatcctcaggacgtcccggcgattcgagacaggatacgcgcccaccccgctgtcgttgacatctacgagtacgacatacccttcgccaagcgctacctcatcgacaagggcctgattccgatggagggcgacgaggagcttacgatgctcgccttcgcgatcgcaaccctctatcacgagggcgaggagttcggaaccgggccgattctcatgataagctacgccgacgggagcgaggcgagggtgataacctggaagaagattgaccttccgtacgttgacgtcgtctcgaccgagaaggagatgattaagcgcttcctccgcgtcgtcagggagaaggaccccgacgtgctcatcacctacaacggcgacaacttcgacttcgcctacctgaagaagcgctgtgaggaactcggaataaagttcacactcggcagggacgggagcgagccgaagatacagcgaatgggcgaccgctttgccgttgaggtgaagggcaggattcacttcgacctctaccccgtcataaggcgcacgataaacctcccgacctacacccttgaggccgtttacgaggccgtctttggaaagcccaaggagaaggtttacgcagaggagatagcgcaggcctgggagagcggggagggccttgaaagggttgcaagatactcgatggaggacgctaaggtgacctacgagctgggaagggagttcttcccgatggaggcccagctttcgaggcttataggccagagcctctgggacgtctcgcgctcgagcaccggaaatttggtggagtggttcctcctgcggaaggcctacaagaggaacgagctcgccccaaacaagcccgacgagagggagctcgcgagacggcgcgggggctacgctggcgggtacgttaaggaaccagagcggggattgtgggacaacattgtgtatttagacttccgctcgtggtatccttcaatcatcataacccacaacgtctcgccggataccctcaaccgcgagggctgtaaagagtacgacgtcgcccctgaggttggacacaagttctgcaaggacttccccggcttcataccaagcctcctgggagatttgctcgaggagaggcagaagataaagcggaagatgaaggcaacggttgacccgctggagaagaaactcctcgattacaggatgtggcttataaaaatcctcgccaacagcgtgtacggctactacggctacgccaaggcccggtggtactgcaaggagtgcgccgagagcgttacggcctggggaagggagtatatagaaatggttatccgggaactcgaagaaaaattcggttttaaagttctctatgccgatacagacggtctccatgctaccattcccggagcagacgctgaaacagtcaagaaaaaagcaaaggagttcttaaaatacattaatccaaaactgcccggcctgctcgaacttgagtacgagggcttctacgtgaggggcttcttcgtcacgaagaagaagtacgctgtgatagacgaggagggcaagataaccacgaggggtcttgagattgtgaggcgcgactggagcgagatagcgaaggagacccaggccagggtcttagaggcgatactcaagcacggtgacgtcgaggaggccgttaggatagtcaaggaagtgacggaaaagctgagcaagtatgaggtcccgcccgagaagctggtaatccacgagcagataacgcgcgatttgagggattacaaagccaccggcccgcacgttgccgttgcgaagaggctcgcggcgcgtggagtgaaaatccggcccggcacggtgataagctacatcgtcctaaagggctctggaaggataggcgacagggcgattccagctgatgagttcgacccgacgaagcaccgctacgatgcggaatactacatcgagaaccaggttctcccggcggtggagaggattctaaaagccttcggctatcggaaggaggatttgcgctaccagaagacgaagcaggtcggctcgggcgcgtggctgaaggtgaaggggaagaagggtaccgaagcttacgtagaacaaaaactcatctcagaagaggatctgaatagcgccgtcgaccatcatcatcatcatcattga

SEQ ID NO: 312 - protein, 802 aa, Artificial Sequence
  Description of Artificial Sequence:Thermococcus species 9degreesN-7 mutant DNA polymerase, 9degreesN mutant
MILDTDYITENGKPVIRVFKKENGEFKIEYDRTFEPYFYALLKDDSAIEDVKKVTAKRHGTVVKVKRAEKVQKKFLGRPIEVWKLYFNHPQDVPAIRDRIRAHPAVVDIYEYDIPFAKRYLIDKGLIPMEGDEELTMLAFAIATLYHEGEEFGTGPILMISYADGSEARVITWKKIDLPYVDVVSTEKEMIKRFLRVVREKDPDVLITYNGDNFDFAYLKKRCEELGIKFTLGRDGSEPKIQRMGDRFAVEVKGRIHFDLYPVIRRTINLPTYTLEAVYEAVFGKPKEKVYAEEIAQAWESGEGLERVARYSMEDAKVTYELGREFFPMEAQLSRLIGQSLWDVSRSSTGNLVEWFLLRKAYKRNELAPNKPDERELARRRGGYAGGYVKEPERGLWDNIVYLDFRSWYPSIIITHNVSPDTLNREGCKEYDVAPEVGHKFCKDFPGFIPSLLGDLLEERQKIKRKMKATVDPLEKKLLDYRMWLIKILANSVYGYYGYAKARWYCKECAESVTAWGREYIEMVIRELEEKFGFKVLYADTDGLHATIPGADAETVKKKAKEFLKYINPKLPGLLELEYEGFYVRGFFVTKKKYAVIDEEGKITTRGLEIVRRDWSEIAKETQARVLEAILKHGDVEEAVRIVKEVTEKLSKYEVPPEKLVIHEQITRDLRDYKATGPHVAVAKRLAARGVKIRPGTVISYIVLKGSGRIGDRAIPADEFDPTKHRYDAEYYIENQVLPAVERILKAFGYRKEDLRYQKTKQVGSGAWLKVKGKKGTEAYVEQKLISEEDLNSAVDHHHHHH

SEQ ID NO: 313 - DNA, 2409 bp, Artificial Sequence
  Description of Artificial Sequence:Thermococcus species 9degreesN-7 mutant DNA polymerase, 9degreesN mutant
atgattctcgataccgactacatcaccgagaacgggaagcccgtgataagggtcttcaagaaggagaacggcgagtttaaaatcgagtacgacagaaccttcgagccctacttctacgcccttctgaaggacgattctgcgatagaggacgtcaagaaggtaaccgcaaagaggcacggaacggttgtcaaggtgaagcgcgccgagaaggtgcagaagaagttcctcggcaggccgatagaggtctggaagctctacttcaaccatcctcaggacgtcccggcgattcgagacaggatacgcgcccaccccgctgtcgttgacatctacgagtacgacatacccttcgccaagcgctacctcatcgacaagggcctgattccgatggagggcgacgaggagcttacgatgctcgccttcgcgatcgcaaccctctatcacgagggcgaggagttcggaaccgggccgattctcatgataagctacgccgacgggagcgaggcgagggtgataacctggaagaagattgaccttccgtacgttgacgtcgtctcgaccgagaaggagatgattaagcgcttcctccgcgtcgtcagggagaaggaccccgacgtgctcatcacctacaacggcgacaacttcgacttcgcctacctgaagaagcgctgtgaggaactcggaataaagttcacactcggcagggacgggagcgagccgaagatacagcgaatgggcgaccgctttgccgttgaggtgaagggcaggattcacttcgacctctaccccgtcataaggcgcacgataaacctcccgacctacacccttgaggccgtttacgaggccgtctttggaaagcccaaggagaaggtttacgcagaggagatagcgcaggcctgggagagcggggagggccttgaaagggttgcaagatactcgatggaggacgctaaggtgacctacgagctgggaagggagttcttcccgatggaggcccagctttcgaggcttataggccagagcctctgggacgtctcgcgctcgagcaccggaaatttggtggagtggttcctcctgcggaaggcctacaagaggaacgagctcgccccaaacaagcccgacgagagggagctcgcgagacggcgcgggggctacgctggcgggtacgttaaggaaccagagcggggattgtgggacaacattgtgtatttagacttccgctcgtggtatccttcaatcatcataacccacaacgtctcgccggataccctcaaccgcgagggctgtaaagagtacgacgtcgcccctgaggttggacacaagttctgcaaggacttccccggcttcataccaagcctcctgggagatttgctcgaggagaggcagaagataaagcggaagatgaaggcaacggttgacccgctggagaagaaactcctcgattacaggatgtggcttataaaaatcctcgccaacagcacttacggctactacggctacgccaaggcccggtggtactgcaaggagtgcgccgagagcgttacggcctggggaagggagtatatagaaatggttatccgggaactcgaagaaaaattcggttttaaagttctctatgccgatacagacggtctccatgctaccattcccggagcagacgctgaaacagtcaagaaaaaagcaaaggagttcttaaaatacattaatccaaaactgcccggcctgctcgaacttgagtacgagggcttctacgtgaggggcttcttcgtcacgaagaagaagtacgctgtgatagacgaggagggcaagataaccacgaggggtcttgagattgtgaggcgcgactggagcgagatagcgaaggagacccaggccagggtcttagaggcgatactcaagcacggtgacgtcgaggaggccgttaggatagtcaaggaagtgacggaaaagctgagcaagtatgaggtcccgcccgagaagctggtaatccacgagcagataacgcgcgatttgagggattacaaagccaccggcccgcacgttgccgttgcgaagaggctcgcggcgcgtggagtgaaaatccggcccggcacggtgataagctacatcgtcctaaagggctctggaaggataggcgacagggcgattccagctgatgagttcgacccgacgaagcaccgctacgatgcggaatactacatcgagaaccaggttctcccggcggtggagaggattctaaaagccttcggctatcggaaggaggatttgcgctaccagaagacgaagcaggtcggctcgggcgcgtggctgaaggtgaaggggaagaagggtaccgaagcttacgtagaacaaaaactcatctcagaagaggatctgaatagcgccgtcgaccatcatcatcatcatcattga

SEQ ID NO: 314 - protein, 802 aa, Artificial Sequence
  Description of Artificial Sequence:Thermococcus species 9degreesN-7 mutant DNA polymerase, 9degreesN mutant
MILDTDYITENGKPVIRVFKKENGEFKIEYDRTFEPYFYALLKDDSAIEDVKKVTAKRHGTVVKVKRAEKVQKKFLGRPIEVWKLYFNHPQDVPAIRDRIRAHPAVVDIYEYDIPFAKRYLIDKGLIPMEGDEELTMLAFAIATLYHEGEEFGTGPILMISYADGSEARVITWKKIDLPYVDVVSTEKEMIKRFLRVVREKDPDVLITYNGDNFDFAYLKKRCEELGIKFTLGRDGSEPKIQRMGDRFAVEVKGRIHFDLYPVIRRTINLPTYTLEAVYEAVFGKPKEKVYAEEIAQAWESGEGLERVARYSMEDAKVTYELGREFFPMEAQLSRLIGQSLWDVSRSSTGNLVEWFLLRKAYKRNELAPNKPDERELARRRGGYAGGYVKEPERGLWDNIVYLDFRSWYPSIIITHNVSPDTLNREGCKEYDVAPEVGHKFCKDFPGFIPSLLGDLLEERQKIKRKMKATVDPLEKKLLDYRMWLIKILANSTYGYYGYAKARWYCKECAESVTAWGREYIEMVIRELEEKFGFKVLYADTDGLHATIPGADAETVKKKAKEFLKYINPKLPGLLELEYEGFYVRGFFVTKKKYAVIDEEGKITTRGLEIVRRDWSEIAKETQARVLEAILKHGDVEEAVRIVKEVTEKLSKYEVPPEKLVIHEQITRDLRDYKATGPHVAVAKRLAARGVKIRPGTVISYIVLKGSGRIGDRAIPADEFDPTKHRYDAEYYIENQVLPAVERILKAFGYRKEDLRYQKTKQVGSGAWLKVKGKKGTEAYVEQKLISEEDLNSAVDHHHHHH

SEQ ID NO: 315 - DNA, 2409 bp, Artificial Sequence
  Description of Artificial Sequence:Thermococcus species 9degreesN-7 mutant DNA polymerase, 9degreesN mutant
atgattctcgataccgactacatcaccgagaacgggaagcccgtgataagggtcttcaagaaggagaacggcgagtttaaaatcgagtacgacagaaccttcgagccctacttctacgcccttctgaaggacgattctgcgatagaggacgtcaagaaggtaaccgcaaagaggcacggaacggttgtcaaggtgaagcgcgccgagaaggtgcagaagaagttcctcggcaggccgatagaggtctggaagctctacttcaaccatcctcaggacgtcccggcgattcgagacaggatacgcgcccaccccgctgtcgttgacatctacgagtacgacatacccttcgccaagcgctacctcatcgacaagggcctgattccgatggagggcgacgaggagcttacgatgctcgccttcgcgatcgcaaccctctatcacgagggcgaggagttcggaaccgggccgattctcatgataagctacgccgacgggagcgaggcgagggtgataacctggaagaagattgaccttccgtacgttgacgtcgtctcgaccgagaaggagatgattaagcgcttcctccgcgtcgtcagggagaaggaccccgacgtgctcatcacctacaacggcgacaacttcgacttcgcctacctgaagaagcgctgtgaggaactcggaataaagttcacactcggcagggacgggagcgagccgaagatacagcgaatgggcgaccgctttgccgttgaggtgaagggcaggattcacttcgacctctaccccgtcataaggcgcacgataaacctcccgacctacacccttgaggccgtttacgaggccgtctttggaaagcccaaggagaaggtttacgcagaggagatagcgcaggcctgggagagcggggagggccttgaaagggttgcaagatactcgatggaggacgctaaggtgacctacgagctgggaagggagttcttcccgatggaggcccagctttcgaggcttataggccagagcctctgggacgtctcgcgctcgagcaccggaaatttggtggagtggttcctcctgcggaaggcctacaagaggaacgagctcgccccaaacaagcccgacgagagggagctcgcgagacggcgcgggggctacgctggcgggtacgttaaggaaccagagcggggattgtgggacaacattgtgtatttagacttccgctcgtggtatccttcaatcatcataacccacaacgtctcgccggataccctcaaccgcgagggctgtaaagagtacgacgtcgcccctgaggttggacacaagttctgcaaggacttccccggcttcaaaccaagcctcctgggagatttgctcgaggagaggcagaagataaagcggaagatgaaggcaacggttgacccgctggagaagaaactcctcgattacaggatgtggcttataaaaatcctcgccaacagcttctacggctactacggctacgccaaggcccggtggtactgcaaggagtgcgccgagagcgttacggcctggggaagggagtatatagaaatggttatccgggaactcgaagaaaaattcggttttaaagttctctatgccgatacagacggtctccatgctaccattcccggagcagacgctgaaacagtcaagaaaaaagcaaaggagttcttaaaatacattaatccaaaactgcccggcctgctcgaacttgagtacgagggcttctacgtgaggggcttcttcgtcacgaagaagaagtacgctgtgatagacgaggagggcaagataaccacgaggggtcttgagattgtgaggcgcgactggagcgagatagcgaaggagacccaggccagggtcttagaggcgatactcaagcacggtgacgtcgaggaggccgttaggatagtcaaggaagtgacggaaaagctgagcaagtatgaggtcccgcccgagaagctggtaatccacgagcagataacgcgcgatttgagggattacaaagccaccggcccgcacgttgccgttgcgaagaggctcgcggcgcgtggagtgaaaatccggcccggcacggtgataagctacatcgtcctaaagggctctggaaggataggcgacagggcgattccagctgatgagttcgacccgacgaagcaccgctacgatgcggaatactacatcgagaaccaggttctcccggcggtggagaggattctaaaagccttcggctatcggaaggaggatttgcgctaccagaagacgaagcaggtcggctcgggcgcgtggctgaaggtgaaggggaagaagggtaccgaagcttacgtagaacaaaaactcatctcagaagaggatctgaatagcgccgtcgaccatcatcatcatcatcattga

SEQ ID NO: 316 - protein, 802 aa, Artificial Sequence
  Description of Artificial Sequence:Thermococcus species 9degreesN-7 mutant DNA polymerase, 9degreesN mutant
MILDTDYITENGKPVIRVFKKENGEFKIEYDRTFEPYFYALLKDDSAIEDVKKVTAKRHGTVVKVKRAEKVQKKFLGRPIEVWKLYFNHPQDVPAIRDRIRAHPAVVDIYEYDIPFAKRYLIDKGLIPMEGDEELTMLAFAIATLYHEGEEFGTGPILMISYADGSEARVITWKKIDLPYVDVVSTEKEMIKRFLRVVREKDPDVLITYNGDNFDFAYLKKRCEELGIKFTLGRDGSEPKIQRMGDRFAVEVKGRIHFDLYPVIRRTINLPTYTLEAVYEAVFGKPKEKVYAEEIAQAWESGEGLERVARYSMEDAKVTYELGREFFPMEAQLSRLIGQSLWDVSRSSTGNLVEWFLLRKAYKRNELAPNKPDERELARRRGGYAGGYVKEPERGLWDNIVYLDFRSWYPSIIITHNVSPDTLNREGCKEYDVAPEVGHKFCKDFPGFKPSLLGDLLEERQKIKRKMKATVDPLEKKLLDYRMWLIKILANSFYGYYGYAKARWYCKECAESVTAWGREYIEMVIRELEEKFGFKVLYADTDGLHATIPGADAETVKKKAKEFLKYINPKLPGLLELEYEGFYVRGFFVTKKKYAVIDEEGKITTRGLEIVRRDWSEIAKETQARVLEAILKHGDVEEAVRIVKEVTEKLSKYEVPPEKLVIHEQITRDLRDYKATGPHVAVAKRLAARGVKIRPGTVISYIVLKGSGRIGDRAIPADEFDPTKHRYDAEYYIENQVLPAVERILKAFGYRKEDLRYQKTKQVGSGAWLKVKGKKGTEAYVEQKLISEEDLNSAVDHHHHHH

SEQ ID NO: 317 - DNA, 2409 bp, Artificial Sequence
  Description of Artificial Sequence:Thermococcus species 9degreesN-7 mutant DNA polymerase, 9degreesN mutant
atgattctcgataccgactacatcaccgagaacgggaagcccgtgataagggtcttcaagaaggagaacggcgagtttaaaatcgagtacgacagaaccttcgagccctacttctacgcccttctgaaggacgattctgcgatagaggacgtcaagaaggtaaccgcaaagaggcacggaacggttgtcaaggtgaagcgcgccgagaaggtgcagaagaagttcctcggcaggccgatagaggtctggaagctctacttcaaccatcctcaggacgtcccggcgattcgagacaggatacgcgcccaccccgctgtcgttgacatctacgagtacgacatacccttcgccaagcgctacctcatcgacaagggcctgattccgatggagggcgacgaggagcttacgatgctcgccttcgcgatcgcaaccctctatcacgagggcgaggagttcggaaccgggccgattctcatgataagctacgccgacgggagcgaggcgagggtgataacctggaagaagattgaccttccgtacgttgacgtcgtctcgaccgagaaggagatgattaagcgcttcctccgcgtcgtcagggagaaggaccccgacgtgctcatcacctacaacggcgacaacttcgacttcgcctacctgaagaagcgctgtgaggaactcggaataaagttcacactcggcagggacgggagcgagccgaagatacagcgaatgggcgaccgctttgccgttgaggtgaagggcaggattcacttcgacctctaccccgtcataaggcgcacgataaacctcccgacctacacccttgaggccgtttacgaggccgtctttggaaagcccaaggagaaggtttacgcagaggagatagcgcaggcctgggagagcggggagggccttgaaagggttgcaagatactcgatggaggacgctaaggtgacctacgagctgggaagggagttcttcccgatggaggcccagctttcgaggcttataggccagagcctctgggacgtctcgcgctcgagcaccggaaatttggtggagtggttcctcctgcggaaggcctacaagaggaacgagctcgccccaaacaagcccgacgagagggagctcgcgagacggcgcgggggctacgctggcgggtacgttaaggaaccagagcggggattgtgggacaacattgtgtatttagacttccgctcgtggtatccttcaatcatcataacccacaacgtctcgccggataccctcaaccgcgagggctgtaaagagtacgacgtcgcccctgaggttggacacaagttctgcaaggacttccccggcttctcaccaagcctcctgggagatttgctcgaggagaggcagaagataaagcggaagatgaaggcaacggttgacccgctggagaagaaactcctcgattacaggatgtggcttataaaaatcctcgccaacagcttctacggctactacggctacgccaaggcccggtggtactgcaaggagtgcgccgagagcgttacggcctggggaagggagtatatagaaatggttatccgggaactcgaagaaaaattcggttttaaagttctctatgccgatacagacggtctccatgctaccattcccggagcagacgctgaaacagtcaagaaaaaagcaaaggagttcttaaaatacattaatccaaaactgcccggcctgctcgaacttgagtacgagggcttctacgtgaggggcttcttcgtcacgaagaagaagtacgctgtgatagacgaggagggcaagataaccacgaggggtcttgagattgtgaggcgcgactggagcgagatagcgaaggagacccaggccagggtcttagaggcgatactcaagcacggtgacgtcgaggaggccgttaggatagtcaaggaagtgacggaaaagctgagcaagtatgaggtcccgcccgagaagctggtaatccacgagcagataacgcgcgatttgagggattacaaagccaccggcccgcacgttgccgttgcgaagaggctcgcggcgcgtggagtgaaaatccggcccggcacggtgataagctacatcgtcctaaagggctctggaaggataggcgacagggcgattccagctgatgagttcgacccgacgaagcaccgctacgatgcggaatactacatcgagaaccaggttctcccggcggtggagaggattctaaaagccttcggctatcggaaggaggatttgcgctaccagaagacgaagcaggtcggctcgggcgcgtggctgaaggtgaaggggaagaagggtaccgaagcttacgtagaacaaaaactcatctcagaagaggatctgaatagcgccgtcgaccatcatcatcatcatcattga

SEQ ID NO: 318 - protein, 802 aa, Artificial Sequence
  Description of Artificial Sequence:Thermococcus species 9degreesN-7 mutant DNA polymerase, 9degreesN mutant
MILDTDYITENGKPVIRVFKKENGEFKIEYDRTFEPYFYALLKDDSAIEDVKKVTAKRHGTVVKVKRAEKVQKKFLGRPIEVWKLYFNHPQDVPAIRDRIRAHPAVVDIYEYDIPFAKRYLIDKGLIPMEGDEELTMLAFAIATLYHEGEEFGTGPILMISYADGSEARVITWKKIDLPYVDVVSTEKEMIKRFLRVVREKDPDVLITYNGDNFDFAYLKKRCEELGIKFTLGRDGSEPKIQRMGDRFAVEVKGRIHFDLYPVIRRTINLPTYTLEAVYEAVFGKPKEKVYAEEIAQAWESGEGLERVARYSMEDAKVTYELGREFFPMEAQLSRLIGQSLWDVSRSSTGNLVEWFLLRKAYKRNELAPNKPDERELARRRGGYAGGYVKEPERGLWDNIVYLDFRSWYPSIIITHNVSPDTLNREGCKEYDVAPEVGHKFCKDFPGFSPSLLGDLLEERQKIKRKMKATVDPLEKKLLDYRMWLIKILANSFYGYYGYAKARWYCKECAESVTAWGREYIEMVIRELEEKFGFKVLYADTDGLHATIPGADAETVKKKAKEFLKYINPKLPGLLELEYEGFYVRGFFVTKKKYAVIDEEGKITTRGLEIVRRDWSEIAKETQARVLEAILKHGDVEEAVRIVKEVTEKLSKYEVPPEKLVIHEQITRDLRDYKATGPHVAVAKRLAARGVKIRPGTVISYIVLKGSGRIGDRAIPADEFDPTKHRYDAEYYIENQVLPAVERILKAFGYRKEDLRYQKTKQVGSGAWLKVKGKKGTEAYVEQKLISEEDLNSAVDHHHHHH

SEQ ID NO: 319 - DNA, 2409 bp, Artificial Sequence
  Description of Artificial Sequence:Thermococcus species 9degreesN-7 mutant DNA polymerase, 9degreesN mutant
atgattctcgataccgactacatcaccgagaacgggaagcccgtgataagggtcttcaagaaggagaacggcgagtttaaaatcgagtacgacagaaccttcgagccctacttctacgcccttctgaaggacgattctgcgatagaggacgtcaagaaggtaaccgcaaagaggcacggaacggttgtcaaggtgaagcgcgccgagaaggtgcagaagaagttcctcggcaggccgatagaggtctggaagctctacttcaaccatcctcaggacgtcccggcgattcgagacaggatacgcgcccaccccgctgtcgttgacatctacgagtacgacatacccttcgccaagcgctacctcatcgacaagggcctgattccgatggagggcgacgaggagcttacgatgctcgccttcgcgatcgcaaccctctatcacgagggcgaggagttcggaaccgggccgattctcatgataagctacgccgacgggagcgaggcgagggtgataacctggaagaagattgaccttccgtacgttgacgtcgtctcgaccgagaaggagatgattaagcgcttcctccgcgtcgtcagggagaaggaccccgacgtgctcatcacctacaacggcgacaacttcgacttcgcctacctgaagaagcgctgtgaggaactcggaataaagttcacactcggcagggacgggagcgagccgaagatacagcgaatgggcgaccgctttgccgttgaggtgaagggcaggattcacttcgacctctaccccgtcataaggcgcacgataaacctcccgacctacacccttgaggccgtttacgaggccgtctttggaaagcccaaggagaaggtttacgcagaggagatagcgcaggcctgggagagcggggagggccttgaaagggttgcaagatactcgatggaggacgctaaggtgacctacgagctgggaagggagttcttcccgatggaggcccagctttcgaggcttataggccagagcctctgggacgtctcgcgctcgagcaccggaaatttggtggagtggttcctcctgcggagcgcctacaagaggaacgagctcgccccaaacaagcccgacgagagggagctcgcgagacggcgcgggggctacgctggcgggtacgttaaggaaccagagcggggattgtgggacaacattgtgtatttagacttccgctcgtggtatccttcaatcatcataacccacaacgtctcgccggataccctcaaccgcgagggctgtaaagagtacgacgtcgcccctgaggttggacacaagttctgcaaggacttccccggcttcataccaagcctcctgggagatttgctcgaggagaggcagaagataaagcggaagatgaaggcaacggttgacccgctggagaagaaactcctcgattacaggatgtggcttataaaaatcctcgccaacagcttctacggctactacggctacgccaaggcccggtggtactgcaaggagtgcgccgagagcgttacggcctggggaagggagtatatagaaatggttatccgggaactcgaagaaaaattcggttttaaagttctctatgccgatacagacggtctccatgctaccattcccggagcagacgctgaaacagtcaagaaaaaagcaaaggagttcttaaaatacattaatccaaaactgcccggcctgctcgaacttgagtacgagggcttctacgtgaggggcttcttcgtcacgaagaagaagtacgctgtgatagacgaggagggcaagataaccacgaggggtcttgagattgtgaggcgcgactggagcgagatagcgaaggagacccaggccagggtcttagaggcgatactcaagcacggtgacgtcgaggaggccgttaggatagtcaaggaagtgacggaaaagctgagcaagtatgaggtcccgcccgagaagctggtaatccacgagcagataacgcgcgatttgagggattacaaagccaccggcccgcacgttgccgttgcgaagaggctcgcggcgcgtggagtgaaaatccggcccggcacggtgataagctacatcgtcctaaagggctctggaaggataggcgacagggcgattccagctgatgagttcgacccgacgaagcaccgctacgatgcggaatactacatcgagaaccaggttctcccggcggtggagaggattctaaaagccttcggctatcggaaggaggatttgcgctaccagaagacgaagcaggtcggctcgggcgcgtggctgaaggtgaaggggaagaagggtaccgaagcttacgtagaacaaaaactcatctcagaagaggatctgaatagcgccgtcgaccatcatcatcatcatcattga

SEQ ID NO: 320 - protein, 802 aa, Artificial Sequence
  Description of Artificial Sequence:Thermococcus species 9degreesN-7 mutant DNA polymerase, 9degreesN mutant
MILDTDYITENGKPVIRVFKKENGEFKIEYDRTFEPYFYALLKDDSAIEDVKKVTAKRHGTVVKVKRAEKVQKKFLGRPIEVWKLYFNHPQDVPAIRDRIRAHPAVVDIYEYDIPFAKRYLIDKGLIPMEGDEELTMLAFAIATLYHEGEEFGTGPILMISYADGSEARVITWKKIDLPYVDVVSTEKEMIKRFLRVVREKDPDVLITYNGDNFDFAYLKKRCEELGIKFTLGRDGSEPKIQRMGDRFAVEVKGRIHFDLYPVIRRTINLPTYTLEAVYEAVFGKPKEKVYAEEIAQAWESGEGLERVARYSMEDAKVTYELGREFFPMEAQLSRLIGQSLWDVSRSSTGNLVEWFLLRSAYKRNELAPNKPDERELARRRGGYAGGYVKEPERGLWDNIVYLDFRSWYPSIIITHNVSPDTLNREGCKEYDVAPEVGHKFCKDFPGFIPSLLGDLLEERQKIKRKMKATVDPLEKKLLDYRMWLIKILANSFYGYYGYAKARWYCKECAESVTAWGREYIEMVIRELEEKFGFKVLYADTDGLHATIPGADAETVKKKAKEFLKYINPKLPGLLELEYEGFYVRGFFVTKKKYAVIDEEGKITTRGLEIVRRDWSEIAKETQARVLEAILKHGDVEEAVRIVKEVTEKLSKYEVPPEKLVIHEQITRDLRDYKATGPHVAVAKRLAARGVKIRPGTVISYIVLKGSGRIGDRAIPADEFDPTKHRYDAEYYIENQVLPAVERILKAFGYRKEDLRYQKTKQVGSGAWLKVKGKKGTEAYVEQKLISEEDLNSAVDHHHHHH

SEQ ID NO: 321 - DNA, 2409 bp, Artificial Sequence
  Description of Artificial Sequence:Thermococcus species 9degreesN-7 mutant DNA polymerase, 9degreesN mutant
atgattctcgataccgactacatcaccgagaacgggaagcccgtgataagggtcttcaagaaggagaacggcgagtttaaaatcgagtacgacagaaccttcgagccctacttctacgcccttctgaaggacgattctgcgatagaggacgtcaagaaggtaaccgcaaagaggcacggaacggttgtcaaggtgaagcgcgccgagaaggtgcagaagaagttcctcggcaggccgatagaggtctggaagctctacttcaaccatcctcaggacgtcccggcgattcgagacaggatacgcgcccaccccgctgtcgttgacatctacgagtacgacatacccttcgccaagcgctacctcatcgacaagggcctgattccgatggagggcgacgaggagcttacgatgctcgccttcgcgatcgcaaccctctatcacgagggcgaggagttcggaaccgggccgattctcatgataagctacgccgacgggagcgaggcgagggtgataacctggaagaagattgaccttccgtacgttgacgtcgtctcgaccgagaaggagatgattaagcgcttcctccgcgtcgtcagggagaaggaccccgacgtgctcatcacctacaacggcgacaacttcgacttcgcctacctgaagaagcgctgtgaggaactcggaataaagttcacactcggcagggacgggagcgagccgaagatacagcgaatgggcgaccgctttgccgttgaggtgaagggcaggattcacttcgacctctaccccgtcataaggcgcacgataaacctcccgacctacacccttgaggccgtttacgaggccgtctttggaaagcccaaggagaaggtttacgcagaggagatagcgcaggcctgggagagcggggagggccttgaaagggttgcaagatactcgatggaggacgctaaggtgacctacgagctgggaagggagttcttcccgatggaggcccagctttcgaggcttataggccagagcctctgggacgtctcgcgctcgagcaccggaaatttggtggagtggttcctcctgcggaaggcctacctaaggaacgagctcgccccaaacaagcccgacgagagggagctcgcgagacggcgcgggggctacgctggcgggtacgttaaggaaccagagcggggattgtgggacaacattgtgtatttagacttccgctcgtggtatccttcaatcatcataacccacaacgtctcgccggataccctcaaccgcgagggctgtaaagagtacgacgtcgcccctgaggttggacacaagttctgcaaggacttccccggcttcataccaagcctcctgggagatttgctcgaggagaggcagaagataaagcggaagatgaaggcaacggttgacccgctggagaagaaactcctcgattacaggatgtggcttataaaaatcctcgccaacagcttctacggctactacggctacgccaaggcccggtggtactgcaaggagtgcgccgagagcgttacggcctggggaagggagtatatagaaatggttatccgggaactcgaagaaaaattcggttttaaagttctctatgccgatacagacggtctccatgctaccattcccggagcagacgctgaaacagtcaagaaaaaagcaaaggagttcttaaaatacattaatccaaaactgcccggcctgctcgaacttgagtacgagggcttctacgtgaggggcttcttcgtcacgaagaagaagtacgctgtgatagacgaggagggcaagataaccacgaggggtcttgagattgtgaggcgcgactggagcgagatagcgaaggagacccaggccagggtcttagaggcgatactcaagcacggtgacgtcgaggaggccgttaggatagtcaaggaagtgacggaaaagctgagcaagtatgaggtcccgcccgagaagctggtaatccacgagcagataacgcgcgatttgagggattacaaagccaccggcccgcacgttgccgttgcgaagaggctcgcggcgcgtggagtgaaaatccggcccggcacggtgataagctacatcgtcctaaagggctctggaaggataggcgacagggcgattccagctgatgagttcgacccgacgaagcaccgctacgatgcggaatactacatcgagaaccaggttctcccggcggtggagaggattctaaaagccttcggctatcggaaggaggatttgcgctaccagaagacgaagcaggtcggctcgggcgcgtggctgaaggtgaaggggaagaagggtaccgaagcttacgtagaacaaaaactcatctcagaagaggatctgaatagcgccgtcgaccatcatcatcatcatcattga

SEQ ID NO: 322 - protein, 802 aa, Artificial Sequence
  Description of Artificial Sequence:Thermococcus species 9degreesN-7 mutant DNA polymerase, 9degreesN mutant
MILDTDYITENGKPVIRVFKKENGEFKIEYDRTFEPYFYALLKDDSAIEDVKKVTAKRHGTVVKVKRAEKVQKKFLGRPIEVWKLYFNHPQDVPAIRDRIRAHPAVVDIYEYDIPFAKRYLIDKGLIPMEGDEELTMLAFAIATLYHEGEEFGTGPILMISYADGSEARVITWKKIDLPYVDVVSTEKEMIKRFLRVVREKDPDVLITYNGDNFDFAYLKKRCEELGIKFTLGRDGSEPKIQRMGDRFAVEVKGRIHFDLYPVIRRTINLPTYTLEAVYEAVFGKPKEKVYAEEIAQAWESGEGLERVARYSMEDAKVTYELGREFFPMEAQLSRLIGQSLWDVSRSSTGNLVEWFLLRKAYLRNELAPNKPDERELARRRGGYAGGYVKEPERGLWDNIVYLDFRSWYPSIIITHNVSPDTLNREGCKEYDVAPEVGHKFCKDFPGFIPSLLGDLLEERQKIKRKMKATVDPLEKKLLDYRMWLIKILANSFYGYYGYAKARWYCKECAESVTAWGREYIEMVIRELEEKFGFKVLYADTDGLHATIPGADAETVKKKAKEFLKYINPKLPGLLELEYEGFYVRGFFVTKKKYAVIDEEGKITTRGLEIVRRDWSEIAKETQARVLEAILKHGDVEEAVRIVKEVTEKLSKYEVPPEKLVIHEQITRDLRDYKATGPHVAVAKRLAARGVKIRPGTVISYIVLKGSGRIGDRAIPADEFDPTKHRYDAEYYIENQVLPAVERILKAFGYRKEDLRYQKTKQVGSGAWLKVKGKKGTEAYVEQKLISEEDLNSAVDHHHHHH

SEQ ID NO: 323 - DNA, 2409 bp, Artificial Sequence
  Description of Artificial Sequence:Thermococcus species 9degreesN-7 mutant DNA polymerase, 9degreesN mutant
atgattctcgataccgactacatcaccgagaacgggaagcccgtgataagggtcttcaagaaggagaacggcgagtttaaaatcgagtacgacagaaccttcgagccctacttctacgcccttctgaaggacgattctgcgatagaggacgtcaagaaggtaaccgcaaagaggcacggaacggttgtcaaggtgaagcgcgccgagaaggtgcagaagaagttcctcggcaggccgatagaggtctggaagctctacttcaaccatcctcaggacgtcccggcgattcgagacaggatacgcgcccaccccgctgtcgttgacatctacgagtacgacatacccttcgccaagcgctacctcatcgacaagggcctgattccgatggagggcgacgaggagcttacgatgctcgccttcgcgatcgcaaccctctatcacgagggcgaggagttcggaaccgggccgattctcatgataagctacgccgacgggagcgaggcgagggtgataacctggaagaagattgaccttccgtacgttgacgtcgtctcgaccgagaaggagatgattaagcgcttcctccgcgtcgtcagggagaaggaccccgacgtgctcatcacctacaacggcgacaacttcgacttcgcctacctgaagaagcgctgtgaggaactcggaataaagttcacactcggcagggacgggagcgagccgaagatacagcgaatgggcgaccgctttgccgttgaggtgaagggcaggattcacttcgacctctaccccgtcataaggcgcacgataaacctcccgacctacacccttgaggccgtttacgaggccgtctttggaaagcccaaggagaaggtttacgcagaggagatagcgcaggcctgggagagcggggagggccttgaaagggttgcaagatactcgatggaggacgctaaggtgacctacgagctgggaagggagttcttcccgatggaggcccagctttcgaggcttataggccagagcctctgggacgtctcgcgctcgagcaccggaaatttggtggagtggttcctcctgcggaaggcctacggtaggaacgagctcgccccaaacaagcccgacgagagggagctcgcgagacggcgcgggggctacgctggcgggtacgttaaggaaccagagcggggattgtgggacaacattgtgtatttagacttccgctcgtggtatccttcaatcatcataacccacaacgtctcgccggataccctcaaccgcgagggctgtaaagagtacgacgtcgcccctgaggttggacacaagttctgcaaggacttccccggcttcataccaagcctcctgggagatttgctcgaggagaggcagaagataaagcggaagatgaaggcaacggttgacccgctggagaagaaactcctcgattacaggatgtggcttataaaaatcctcgccaacagcttctacggctactacggctacgccaaggcccggtggtactgcaaggagtgcgccgagagcgttacggcctggggaagggagtatatagaaatggttatccgggaactcgaagaaaaattcggttttaaagttctctatgccgatacagacggtctccatgctaccattcccggagcagacgctgaaacagtcaagaaaaaagcaaaggagttcttaaaatacattaatccaaaactgcccggcctgctcgaacttgagtacgagggcttctacgtgaggggcttcttcgtcacgaagaagaagtacgctgtgatagacgaggagggcaagataaccacgaggggtcttgagattgtgaggcgcgactggagcgagatagcgaaggagacccaggccagggtcttagaggcgatactcaagcacggtgacgtcgaggaggccgttaggatagtcaaggaagtgacggaaaagctgagcaagtatgaggtcccgcccgagaagctggtaatccacgagcagataacgcgcgatttgagggattacaaagccaccggcccgcacgttgccgttgcgaagaggctcgcggcgcgtggagtgaaaatccggcccggcacggtgataagctacatcgtcctaaagggctctggaaggataggcgacagggcgattccagctgatgagttcgacccgacgaagcaccgctacgatgcggaatactacatcgagaaccaggttctcccggcggtggagaggattctaaaagccttcggctatcggaaggaggatttgcgctaccagaagacgaagcaggtcggctcgggcgcgtggctgaaggtgaaggggaagaagggtaccgaagcttacgtagaacaaaaactcatctcagaagaggatctgaatagcgccgtcgaccatcatcatcatcatcattga

SEQ ID NO: 324 - protein, 802 aa, Artificial Sequence
  Description of Artificial Sequence:Thermococcus species 9degreesN-7 mutant DNA polymerase, 9degreesN mutant
MILDTDYITENGKPVIRVFKKENGEFKIEYDRTFEPYFYALLKDDSAIEDVKKVTAKRHGTVVKVKRAEKVQKKFLGRPIEVWKLYFNHPQDVPAIRDRIRAHPAVVDIYEYDIPFAKRYLIDKGLIPMEGDEELTMLAFAIATLYHEGEEFGTGPILMISYADGSEARVITWKKIDLPYVDVVSTEKEMIKRFLRVVREKDPDVLITYNGDNFDFAYLKKRCEELGIKFTLGRDGSEPKIQRMGDRFAVEVKGRIHFDLYPVIRRTINLPTYTLEAVYEAVFGKPKEKVYAEEIAQAWESGEGLERVARYSMEDAKVTYELGREFFPMEAQLSRLIGQSLWDVSRSSTGNLVEWFLLRKAYGRNELAPNKPDERELARRRGGYAGGYVKEPERGLWDNIVYLDFRSWYPSIIITHNVSPDTLNREGCKEYDVAPEVGHKFCKDFPGFIPSLLGDLLEERQKIKRKMKATVDPLEKKLLDYRMWLIKILANSFYGYYGYAKARWYCKECAESVTAWGREYIEMVIRELEEKFGFKVLYADTDGLHATIPGADAETVKKKAKEFLKYINPKLPGLLELEYEGFYVRGFFVTKKKYAVIDEEGKITTRGLEIVRRDWSEIAKETQARVLEAILKHGDVEEAVRIVKEVTEKLSKYEVPPEKLVIHEQITRDLRDYKATGPHVAVAKRLAARGVKIRPGTVISYIVLKGSGRIGDRAIPADEFDPTKHRYDAEYYIENQVLPAVERILKAFGYRKEDLRYQKTKQVGSGAWLKVKGKKGTEAYVEQKLISEEDLNSAVDHHHHHH

SEQ ID NO: 325 - DNA, 2409 bp, Artificial Sequence
  Description of Artificial Sequence:Thermococcus species 9degreesN-7 mutant DNA polymerase, 9degreesN mutant
atgattctcgataccgactacatcaccgagaacgggaagcccgtgataagggtcttcaagaaggagaacggcgagtttaaaatcgagtacgacagaaccttcgagccctacttctacgcccttctgaaggacgattctgcgatagaggacgtcaagaaggtaaccgcaaagaggcacggaacggttgtcaaggtgaagcgcgccgagaaggtgcagaagaagttcctcggcaggccgatagaggtctggaagctctacttcaaccatcctcaggacgtcccggcgattcgagacaggatacgcgcccaccccgctgtcgttgacatctacgagtacgacatacccttcgccaagcgctacctcatcgacaagggcctgattccgatggagggcgacgaggagcttacgatgctcgccttcgcgatcgcaaccctctatcacgagggcgaggagttcggaaccgggccgattctcatgataagctacgccgacgggagcgaggcgagggtgataacctggaagaagattgaccttccgtacgttgacgtcgtctcgaccgagaaggagatgattaagcgcttcctccgcgtcgtcagggagaaggaccccgacgtgctcatcacctacaacggcgacaacttcgacttcgcctacctgaagaagcgctgtgaggaactcggaataaagttcacactcggcagggacgggagcgagccgaagatacagcgaatgggcgaccgctttgccgttgaggtgaagggcaggattcacttcgacctctaccccgtcataaggcgcacgataaacctcccgacctacacccttgaggccgtttacgaggccgtctttggaaagcccaaggagaaggtttacgcagaggagatagcgcaggcctgggagagcggggagggccttgaaagggttgcaagatactcgatggaggacgctaaggtgacctacgagctgggaagggagttcttcccgatggaggcccagctttcgaggcttataggccagagcctctgggacgtctcgcgctcgagcaccggaaatttggtggagtggttcctcctgcggaaggcctacaagaggaacgagctcgccccaaacaagcccgacgagagggagctcgcgagacggcgcgggggctacgctggcgggtacgttaaggaaccagagcggggattgtgggacaacattgtgtatttagacttccgctcgtggtatccttcaatcatcataacccacaacgtctcgccggataccctcaaccgcgagggctgtaaagagtacgacgtcgcccctgaggttggacacaagttctgcaaggacttccccggcttcataccaagcctcctgggagatttgctcgaggagaggcagaagatagtgcggaagatgaaggcaacggttgacccgctggagaagaaactcctcgattacaggatgtggcttataaaaatcctcgccaacagcttctacggctactacggctacgccaaggcccggtggtactgcaaggagtgcgccgagagcgttacggcctggggaagggagtatatagaaatggttatccgggaactcgaagaaaaattcggttttaaagttctctatgccgatacagacggtctccatgctaccattcccggagcagacgctgaaacagtcaagaaaaaagcaaaggagttcttaaaatacattaatccaaaactgcccggcctgctcgaacttgagtacgagggcttctacgtgaggggcttcttcgtcacgaagaagaagtacgctgtgatagacgaggagggcaagataaccacgaggggtcttgagattgtgaggcgcgactggagcgagatagcgaaggagacccaggccagggtcttagaggcgatactcaagcacggtgacgtcgaggaggccgttaggatagtcaaggaagtgacggaaaagctgagcaagtatgaggtcccgcccgagaagctggtaatccacgagcagataacgcgcgatttgagggattacaaagccaccggcccgcacgttgccgttgcgaagaggctcgcggcgcgtggagtgaaaatccggcccggcacggtgataagctacatcgtcctaaagggctctggaaggataggcgacagggcgattccagctgatgagttcgacccgacgaagcaccgctacgatgcggaatactacatcgagaaccaggttctcccggcggtggagaggattctaaaagccttcggctatcggaaggaggatttgcgctaccagaagacgaagcaggtcggctcgggcgcgtggctgaaggtgaaggggaagaagggtaccgaagcttacgtagaacaaaaactcatctcagaagaggatctgaatagcgccgtcgaccatcatcatcatcatcattga

SEQ ID NO: 326 - protein, 802 aa, Artificial Sequence
  Description of Artificial Sequence:Thermococcus species 9degreesN-7 mutant DNA polymerase, 9degreesN mutant
MILDTDYITENGKPVIRVFKKENGEFKIEYDRTFEPYFYALLKDDSAIEDVKKVTAKRHGTVVKVKRAEKVQKKFLGRPIEVWKLYFNHPQDVPAIRDRIRAHPAVVDIYEYDIPFAKRYLIDKGLIPMEGDEELTMLAFAIATLYHEGEEFGTGPILMISYADGSEARVITWKKIDLPYVDVVSTEKEMIKRFLRVVREKDPDVLITYNGDNFDFAYLKKRCEELGIKFTLGRDGSEPKIQRMGDRFAVEVKGRIHFDLYPVIRRTINLPTYTLEAVYEAVFGKPKEKVYAEEIAQAWESGEGLERVARYSMEDAKVTYELGREFFPMEAQLSRLIGQSLWDVSRSSTGNLVEWFLLRKAYKRNELAPNKPDERELARRRGGYAGGYVKEPERGLWDNIVYLDFRSWYPSIIITHNVSPDTLNREGCKEYDVAPEVGHKFCKDFPGFIPSLLGDLLEERQKIVRKMKATVDPLEKKLLDYRMWLIKILANSFYGYYGYAKARWYCKECAESVTAWGREYIEMVIRELEEKFGFKVLYADTDGLHATIPGADAETVKKKAKEFLKYINPKLPGLLELEYEGFYVRGFFVTKKKYAVIDEEGKITTRGLEIVRRDWSEIAKETQARVLEAILKHGDVEEAVRIVKEVTEKLSKYEVPPEKLVIHEQITRDLRDYKATGPHVAVAKRLAARGVKIRPGTVISYIVLKGSGRIGDRAIPADEFDPTKHRYDAEYYIENQVLPAVERILKAFGYRKEDLRYQKTKQVGSGAWLKVKGKKGTEAYVEQKLISEEDLNSAVDHHHHHH

SEQ ID NO: 327 - DNA, 2409 bp, Artificial Sequence
  Description of Artificial Sequence:Thermococcus species 9degreesN-7 mutant DNA polymerase, 9degreesN mutant
atgattctcgataccgactacatcaccgagaacgggaagcccgtgataagggtcttcaagaaggagaacggcgagtttaaaatcgagtacgacagaaccttcgagccctacttctacgcccttctgaaggacgattctgcgatagaggacgtcaagaaggtaaccgcaaagaggcacggaacggttgtcaaggtgaagcgcgccgagaaggtgcagaagaagttcctcggcaggccgatagaggtctggaagctctacttcaaccatcctcaggacgtcccggcgattcgagacaggatacgcgcccaccccgctgtcgttgacatctacgagtacgacatacccttcgccaagcgctacctcatcgacaagggcctgattccgatggagggcgacgaggagcttacgatgctcgccttcgcgatcgcaaccctctatcacgagggcgaggagttcggaaccgggccgattctcatgataagctacgccgacgggagcgaggcgagggtgataacctggaagaagattgaccttccgtacgttgacgtcgtctcgaccgagaaggagatgattaagcgcttcctccgcgtcgtcagggagaaggaccccgacgtgctcatcacctacaacggcgacaacttcgacttcgcctacctgaagaagcgctgtgaggaactcggaataaagttcacactcggcagggacgggagcgagccgaagatacagcgaatgggcgaccgctttgccgttgaggtgaagggcaggattcacttcgacctctaccccgtcataaggcgcacgataaacctcccgacctacacccttgaggccgtttacgaggccgtctttggaaagcccaaggagaaggtttacgcagaggagatagcgcaggcctgggagagcggggagggccttgaaagggttgcaagatactcgatggaggacgctaaggtgacctacgagctgggaagggagttcttcccgatggaggcccagctttcgaggcttataggccagagcctctgggacgtctcgcgctcgagcaccggaaatttggtggagtggttcctcctgcggaaggcctacaagaggaacgagctcgccccaaacaagcccgacgagagggagctcgcgagacggcgcgggggctacgctggcgggtacgttaaggaaccagagcggggattgtgggacaacattgtgtatttagacttccgctcgtggtatccttcaatcatcataacccacaacgtctcgccggataccctcaaccgcgagggctgtaaagagtacgacgtcgcccctgaggttggacacaagttctgcaaggacttccccggcttcataccaagcctcctgggagatttgctcgaggagaggcagaagatacaccggaagatgaaggcaacggttgacccgctggagaagaaactcctcgattacaggatgtggcttataaaaatcctcgccaacagcttctacggctactacggctacgccaaggcccggtggtactgcaaggagtgcgccgagagcgttacggcctggggaagggagtatatagaaatggttatccgggaactcgaagaaaaattcggttttaaagttctctatgccgatacagacggtctccatgctaccattcccggagcagacgctgaaacagtcaagaaaaaagcaaaggagttcttaaaatacattaatccaaaactgcccggcctgctcgaacttgagtacgagggcttctacgtgaggggcttcttcgtcacgaagaagaagtacgctgtgatagacgaggagggcaagataaccacgaggggtcttgagattgtgaggcgcgactggagcgagatagcgaaggagacccaggccagggtcttagaggcgatactcaagcacggtgacgtcgaggaggccgttaggatagtcaaggaagtgacggaaaagctgagcaagtatgaggtcccgcccgagaagctggtaatccacgagcagataacgcgcgatttgagggattacaaagccaccggcccgcacgttgccgttgcgaagaggctcgcggcgcgtggagtgaaaatccggcccggcacggtgataagctacatcgtcctaaagggctctggaaggataggcgacagggcgattccagctgatgagttcgacccgacgaagcaccgctacgatgcggaatactacatcgagaaccaggttctcccggcggtggagaggattctaaaagccttcggctatcggaaggaggatttgcgctaccagaagacgaagcaggtcggctcgggcgcgtggctgaaggtgaaggggaagaagggtaccgaagcttacgtagaacaaaaactcatctcagaagaggatctgaatagcgccgtcgaccatcatcatcatcatcattga

SEQ ID NO: 328 - protein, 802 aa, Artificial Sequence
  Description of Artificial Sequence:Thermococcus species 9degreesN-7 mutant DNA polymerase, 9degreesN mutant
MILDTDYITENGKPVIRVFKKENGEFKIEYDRTFEPYFYALLKDDSAIEDVKKVTAKRHGTVVKVKRAEKVQKKFLGRPIEVWKLYFNHPQDVPAIRDRIRAHPAVVDIYEYDIPFAKRYLIDKGLIPMEGDEELTMLAFAIATLYHEGEEFGTGPILMISYADGSEARVITWKKIDLPYVDVVSTEKEMIKRFLRVVREKDPDVLITYNGDNFDFAYLKKRCEELGIKFTLGRDGSEPKIQRMGDRFAVEVKGRIHFDLYPVIRRTINLPTYTLEAVYEAVFGKPKEKVYAEEIAQAWESGEGLERVARYSMEDAKVTYELGREFFPMEAQLSRLIGQSLWDVSRSSTGNLVEWFLLRKAYKRNELAPNKPDERELARRRGGYAGGYVKEPERGLWDNIVYLDFRSWYPSIIITHNVSPDTLNREGCKEYDVAPEVGHKFCKDFPGFIPSLLGDLLEERQKIHRKMKATVDPLEKKLLDYRMWLIKILANSFYGYYGYAKARWYCKECAESVTAWGREYIEMVIRELEEKFGFKVLYADTDGLHATIPGADAETVKKKAKEFLKYINPKLPGLLELEYEGFYVRGFFVTKKKYAVIDEEGKITTRGLEIVRRDWSEIAKETQARVLEAILKHGDVEEAVRIVKEVTEKLSKYEVPPEKLVIHEQITRDLRDYKATGPHVAVAKRLAARGVKIRPGTVISYIVLKGSGRIGDRAIPADEFDPTKHRYDAEYYIENQVLPAVERILKAFGYRKEDLRYQKTKQVGSGAWLKVKGKKGTEAYVEQKLISEEDLNSAVDHHHHHH

SEQ ID NO: 329 - DNA, 2409 bp, Artificial Sequence
  Description of Artificial Sequence:Thermococcus species 9degreesN-7 mutant DNA polymerase, 9degreesN mutant
atgattctcgataccgactacatcaccgagaacgggaagcccgtgataagggtcttcaagaaggagaacggcgagtttaaaatcgagtacgacagaaccttcgagccctacttctacgcccttctgaaggacgattctgcgatagaggacgtcaagaaggtaaccgcaaagaggcacggaacggttgtcaaggtgaagcgcgccgagaaggtgcagaagaagttcctcggcaggccgatagaggtctggaagctctacttcaaccatcctcaggacgtcccggcgattcgagacaggatacgcgcccaccccgctgtcgttgacatctacgagtacgacatacccttcgccaagcgctacctcatcgacaagggcctgattccgatggagggcgacgaggagcttacgatgctcgccttcgcgatcgcaaccctctatcacgagggcgaggagttcggaaccgggccgattctcatgataagctacgccgacgggagcgaggcgagggtgataacctggaagaagattgaccttccgtacgttgacgtcgtctcgaccgagaaggagatgattaagcgcttcctccgcgtcgtcagggagaaggaccccgacgtgctcatcacctacaacggcgacaacttcgacttcgcctacctgaagaagcgctgtgaggaactcggaataaagttcacactcggcagggacgggagcgagccgaagatacagcgaatgggcgaccgctttgccgttgaggtgaagggcaggattcacttcgacctctaccccgtcataaggcgcacgataaacctcccgacctacacccttgaggccgtttacgaggccgtctttggaaagcccaaggagaaggtttacgcagaggagatagcgcaggcctgggagagcggggagggccttgaaagggttgcaagatactcgatggaggacgctaaggtgacctacgagctgggaagggagttcttcccgatggaggcccagctttcgaggcttataggccagagcctctgggacgtctcgcgctcgagcaccggaaatttggtggagtggttcctcctgcggaaggcctacaagaggaacgagctcgccccaaacaagcccgacgagagggagctcgcgagacggcgcgggggctacgctggcgggtacgttaaggaaccagagcggggattgtgggacaacattgtgtatttagacttccgctcgtggtatccttcaatcatcataacccacaacgtctcgccggataccctcaaccgcgagggctgtaaagagtacgacgtcgcccctgaggttggacacaagttctgcaaggacttccccggcttcataccaagcctcctgggagatttgctcgaggagaggcagaagataccccggaagatgaaggcaacggttgacccgctggagaagaaactcctcgattacaggatgtggcttataaaaatcctcgccaacagcttctacggctactacggctacgccaaggcccggtggtactgcaaggagtgcgccgagagcgttacggcctggggaagggagtatatagaaatggttatccgggaactcgaagaaaaattcggttttaaagttctctatgccgatacagacggtctccatgctaccattcccggagcagacgctgaaacagtcaagaaaaaagcaaaggagttcttaaaatacattaatccaaaactgcccggcctgctcgaacttgagtacgagggcttctacgtgaggggcttcttcgtcacgaagaagaagtacgctgtgatagacgaggagggcaagataaccacgaggggtcttgagattgtgaggcgcgactggagcgagatagcgaaggagacccaggccagggtcttagaggcgatactcaagcacggtgacgtcgaggaggccgttaggatagtcaaggaagtgacggaaaagctgagcaagtatgaggtcccgcccgagaagctggtaatccacgagcagataacgcgcgatttgagggattacaaagccaccggcccgcacgttgccgttgcgaagaggctcgcggcgcgtggagtgaaaatccggcccggcacggtgataagctacatcgtcctaaagggctctggaaggataggcgacagggcgattccagctgatgagttcgacccgacgaagcaccgctacgatgcggaatactacatcgagaaccaggttctcccggcggtggagaggattctaaaagccttcggctatcggaaggaggatttgcgctaccagaagacgaagcaggtcggctcgggcgcgtggctgaaggtgaaggggaagaagggtaccgaagcttacgtagaacaaaaactcatctcagaagaggatctgaatagcgccgtcgaccatcatcatcatcatcattga

SEQ ID NO: 330 - protein, 802 aa, Artificial Sequence
  Description of Artificial Sequence:Thermococcus species 9degreesN-7 mutant DNA polymerase, 9degreesN mutant
MILDTDYITENGKPVIRVFKKENGEFKIEYDRTFEPYFYALLKDDSAIEDVKKVTAKRHGTVVKVKRAEKVQKKFLGRPIEVWKLYFNHPQDVPAIRDRIRAHPAVVDIYEYDIPFAKRYLIDKGLIPMEGDEELTMLAFAIATLYHEGEEFGTGPILMISYADGSEARVITWKKIDLPYVDVVSTEKEMIKRFLRVVREKDPDVLITYNGDNFDFAYLKKRCEELGIKFTLGRDGSEPKIQRMGDRFAVEVKGRIHFDLYPVIRRTINLPTYTLEAVYEAVFGKPKEKVYAEEIAQAWESGEGLERVARYSMEDAKVTYELGREFFPMEAQLSRLIGQSLWDVSRSSTGNLVEWFLLRKAYKRNELAPNKPDERELARRRGGYAGGYVKEPERGLWDNIVYLDFRSWYPSIIITHNVSPDTLNREGCKEYDVAPEVGHKFCKDFPGFIPSLLGDLLEERQKIPRKMKATVDPLEKKLLDYRMWLIKILANSFYGYYGYAKARWYCKECAESVTAWGREYIEMVIRELEEKFGFKVLYADTDGLHATIPGADAETVKKKAKEFLKYINPKLPGLLELEYEGFYVRGFFVTKKKYAVIDEEGKITTRGLEIVRRDWSEIAKETQARVLEAILKHGDVEEAVRIVKEVTEKLSKYEVPPEKLVIHEQITRDLRDYKATGPHVAVAKRLAARGVKIRPGTVISYIVLKGSGRIGDRAIPADEFDPTKHRYDAEYYIENQVLPAVERILKAFGYRKEDLRYQKTKQVGSGAWLKVKGKKGTEAYVEQKLISEEDLNSAVDHHHHHH

SEQ ID NO: 331 - DNA, 2409 bp, Artificial Sequence
  Description of Artificial Sequence:Thermococcus species 9degreesN-7 mutant DNA polymerase, 9degreesN mutant
atgattctcgataccgactacatcaccgagaacgggaagcccgtgataagggtcttcaagaaggagaacggcgagtttaaaatcgagtacgacagaaccttcgagccctacttctacgcccttctgaaggacgattctgcgatagaggacgtcaagaaggtaaccgcaaagaggcacggaacggttgtcaaggtgaagcgcgccgagaaggtgcagaagaagttcctcggcaggccgatagaggtctggaagctctacttcaaccatcctcaggacgtcccggcgattcgagacaggatacgcgcccaccccgctgtcgttgacatctacgagtacgacatacccttcgccaagcgctacctcatcgacaagggcctgattccgatggagggcgacgaggagcttacgatgctcgccttcgcgatcgcaaccctctatcacgagggcgaggagttcggaaccgggccgattctcatgataagctacgccgacgggagcgaggcgagggtgataacctggaagaagattgaccttccgtacgttgacgtcgtctcgaccgagaaggagatgattaagcgcttcctccgcgtcgtcagggagaaggaccccgacgtgctcatcacctacaacggcgacaacttcgacttcgcctacctgaagaagcgctgtgaggaactcggaataaagttcacactcggcagggacgggagcgagccgaagatacagcgaatgggcgaccgctttgccgttgaggtgaagggcaggattcacttcgacctctaccccgtcataaggcgcacgataaacctcccgacctacacccttgaggccgtttacgaggccgtctttggaaagcccaaggagaaggtttacgcagaggagatagcgcaggcctgggagagcggggagggccttgaaagggttgcaagatactcgatggaggacgctaaggtgacctacgagctgggaagggagttcttcccgatggaggcccagctttcgaggcttataggccagagcctctgggacgtctcgcgctcgagcaccggaaatttggtggagtggttcctcctgcggaaggcctacaagaggaacgagctcgccccaaacaagcccgacgagagggagctcgcgagacggcgcgggggctacgctggcgggtacgttaaggaaccagagcggggattgtgggacaacattgtgtatttagacttccgctcgtggtatccttcaatcatcataacccacaacgtctcgccggataccctcaaccgcgagggctgtaaagagtacgacgtcgcccctgaggttggacacaagttctgcaaggacttccccggcttcataccaagcctcctgggagatttgctcgaggagaggcagaagatagagcggaagatgaaggcaacggttgacccgctggagaagaaactcctcgattacaggatgtggcttataaaaatcctcgccaacagcttctacggctactacggctacgccaaggcccggtggtactgcaaggagtgcgccgagagcgttacggcctggggaagggagtatatagaaatggttatccgggaactcgaagaaaaattcggttttaaagttctctatgccgatacagacggtctccatgctaccattcccggagcagacgctgaaacagtcaagaaaaaagcaaaggagttcttaaaatacattaatccaaaactgcccggcctgctcgaacttgagtacgagggcttctacgtgaggggcttcttcgtcacgaagaagaagtacgctgtgatagacgaggagggcaagataaccacgaggggtcttgagattgtgaggcgcgactggagcgagatagcgaaggagacccaggccagggtcttagaggcgatactcaagcacggtgacgtcgaggaggccgttaggatagtcaaggaagtgacggaaaagctgagcaagtatgaggtcccgcccgagaagctggtaatccacgagcagataacgcgcgatttgagggattacaaagccaccggcccgcacgttgccgttgcgaagaggctcgcggcgcgtggagtgaaaatccggcccggcacggtgataagctacatcgtcctaaagggctctggaaggataggcgacagggcgattccagctgatgagttcgacccgacgaagcaccgctacgatgcggaatactacatcgagaaccaggttctcccggcggtggagaggattctaaaagccttcggctatcggaaggaggatttgcgctaccagaagacgaagcaggtcggctcgggcgcgtggctgaaggtgaaggggaagaagggtaccgaagcttacgtagaacaaaaactcatctcagaagaggatctgaatagcgccgtcgaccatcatcatcatcatcattga

SEQ ID NO: 332 - protein, 802 aa, Artificial Sequence
  Description of Artificial Sequence:Thermococcus species 9degreesN-7 mutant DNA polymerase, 9degreesN mutant
MILDTDYITENGKPVIRVFKKENGEFKIEYDRTFEPYFYALLKDDSAIEDVKKVTAKRHGTVVKVKRAEKVQKKFLGRPIEVWKLYFNHPQDVPAIRDRIRAHPAVVDIYEYDIPFAKRYLIDKGLIPMEGDEELTMLAFAIATLYHEGEEFGTGPILMISYADGSEARVITWKKIDLPYVDVVSTEKEMIKRFLRVVREKDPDVLITYNGDNFDFAYLKKRCEELGIKFTLGRDGSEPKIQRMGDRFAVEVKGRIHFDLYPVIRRTINLPTYTLEAVYEAVFGKPKEKVYAEEIAQAWESGEGLERVARYSMEDAKVTYELGREFFPMEAQLSRLIGQSLWDVSRSSTGNLVEWFLLRKAYKRNELAPNKPDERELARRRGGYAGGYVKEPERGLWDNIVYLDFRSWYPSIIITHNVSPDTLNREGCKEYDVAPEVGHKFCKDFPGFIPSLLGDLLEERQKIERKMKATVDPLEKKLLDYRMWLIKILANSFYGYYGYAKARWYCKECAESVTAWGREYIEMVIRELEEKFGFKVLYADTDGLHATIPGADAETVKKKAKEFLKYINPKLPGLLELEYEGFYVRGFFVTKKKYAVIDEEGKITTRGLEIVRRDWSEIAKETQARVLEAILKHGDVEEAVRIVKEVTEKLSKYEVPPEKLVIHEQITRDLRDYKATGPHVAVAKRLAARGVKIRPGTVISYIVLKGSGRIGDRAIPADEFDPTKHRYDAEYYIENQVLPAVERILKAFGYRKEDLRYQKTKQVGSGAWLKVKGKKGTEAYVEQKLISEEDLNSAVDHHHHHH

SEQ ID NO: 333 - DNA, 2409 bp, Artificial Sequence
  Description of Artificial Sequence:Thermococcus species 9degreesN-7 mutant DNA polymerase, 9degreesN mutant
atgattctcgataccgactacatcaccgagaacgggaagcccgtgataagggtcttcaagaaggagaacggcgagtttaaaatcgagtacgacagaaccttcgagccctacttctacgcccttctgaaggacgattctgcgatagaggacgtcaagaaggtaaccgcaaagaggcacggaacggttgtcaaggtgaagcgcgccgagaaggtgcagaagaagttcctcggcaggccgatagaggtctggaagctctacttcaaccatcctcaggacgtcccggcgattcgagacaggatacgcgcccaccccgctgtcgttgacatctacgagtacgacatacccttcgccaagcgctacctcatcgacaagggcctgattccgatggagggcgacgaggagcttacgatgctcgccttcgcgatcgcaaccctctatcacgagggcgaggagttcggaaccgggccgattctcatgataagctacgccgacgggagcgaggcgagggtgataacctggaagaagattgaccttccgtacgttgacgtcgtctcgaccgagaaggagatgattaagcgcttcctccgcgtcgtcagggagaaggaccccgacgtgctcatcacctacaacggcgacaacttcgacttcgcctacctgaagaagcgctgtgaggaactcggaataaagttcacactcggcagggacgggagcgagccgaagatacagcgaatgggcgaccgctttgccgttgaggtgaagggcaggattcacttcgacctctaccccgtcataaggcgcacgataaacctcccgacctacacccttgaggccgtttacgaggccgtctttggaaagcccaaggagaaggtttacgcagaggagatagcgcaggcctgggagagcggggagggccttgaaagggttgcaagatactcgatggaggacgctaaggtgacctacgagctgggaagggagttcttcccgatggaggcccagctttcgaggcttataggccagagcctctgggacgtctcgcgctcgagcaccggaaatcatgtggagtggttcctcctgcggaaggcctacaagaggaacgagctcgccccaaacaagcccgacgagagggagctcgcgagacggcgcgggggctacgctggcgggtacgttaaggaaccagagcggggattgtgggacaacattgtgtatttagacttccgctcgtggtatccttcaatcatcataacccacaacgtctcgccggataccctcaaccgcgagggctgtaaagagtacgacgtcgcccctgaggttggacacaagttctgcaaggacttccccggcttcataccaagcctcctgggagatttgctcgaggagaggcagaagataaagcggaagatgaaggcaacggttgacccgctggagaagaaactcctcgattacaggatgtggcttataaaaatcctcgccaacagcttctacggctactacggctacgccaaggcccggtggtactgcaaggagtgcgccgagagcgttacggcctggggaagggagtatatagaaatggttatccgggaactcgaagaaaaattcggttttaaagttctctatgccgatacagacggtctccatgctaccattcccggagcagacgctgaaacagtcaagaaaaaagcaaaggagttcttaaaatacattaatccaaaactgcccggcctgctcgaacttgagtacgagggcttctacgtgaggggcttcttcgtcacgaagaagaagtacgctgtgatagacgaggagggcaagataaccacgaggggtcttgagattgtgaggcgcgactggagcgagatagcgaaggagacccaggccagggtcttagaggcgatactcaagcacggtgacgtcgaggaggccgttaggatagtcaaggaagtgacggaaaagctgagcaagtatgaggtcccgcccgagaagctggtaatccacgagcagataacgcgcgatttgagggattacaaagccaccggcccgcacgttgccgttgcgaagaggctcgcggcgcgtggagtgaaaatccggcccggcacggtgataagctacatcgtcctaaagggctctggaaggataggcgacagggcgattccagctgatgagttcgacccgacgaagcaccgctacgatgcggaatactacatcgagaaccaggttctcccggcggtggagaggattctaaaagccttcggctatcggaaggaggatttgcgctaccagaagacgaagcaggtcggctcgggcgcgtggctgaaggtgaaggggaagaagggtaccgaagcttacgtagaacaaaaactcatctcagaagaggatctgaatagcgccgtcgaccatcatcatcatcatcattga

SEQ ID NO: 334 - protein, 802 aa, Artificial Sequence
  Description of Artificial Sequence:Thermococcus species 9degreesN-7 mutant DNA polymerase, 9degreesN mutant
MILDTDYITENGKPVIRVFKKENGEFKIEYDRTFEPYFYALLKDDSAIEDVKKVTAKRHGTVVKVKRAEKVQKKFLGRPIEVWKLYFNHPQDVPAIRDRIRAHPAVVDIYEYDIPFAKRYLIDKGLIPMEGDEELTMLAFAIATLYHEGEEFGTGPILMISYADGSEARVITWKKIDLPYVDVVSTEKEMIKRFLRVVREKDPDVLITYNGDNFDFAYLKKRCEELGIKFTLGRDGSEPKIQRMGDRFAVEVKGRIHFDLYPVIRRTINLPTYTLEAVYEAVFGKPKEKVYAEEIAQAWESGEGLERVARYSMEDAKVTYELGREFFPMEAQLSRLIGQSLWDVSRSSTGNHVEWFLLRKAYKRNELAPNKPDERELARRRGGYAGGYVKEPERGLWDNIVYLDFRSWYPSIIITHNVSPDTLNREGCKEYDVAPEVGHKFCKDFPGFIPSLLGDLLEERQKIKRKMKATVDPLEKKLLDYRMWLIKILANSFYGYYGYAKARWYCKECAESVTAWGREYIEMVIRELEEKFGFKVLYADTDGLHATIPGADAETVKKKAKEFLKYINPKLPGLLELEYEGFYVRGFFVTKKKYAVIDEEGKITTRGLEIVRRDWSEIAKETQARVLEAILKHGDVEEAVRIVKEVTEKLSKYEVPPEKLVIHEQITRDLRDYKATGPHVAVAKRLAARGVKIRPGTVISYIVLKGSGRIGDRAIPADEFDPTKHRYDAEYYIENQVLPAVERILKAFGYRKEDLRYQKTKQVGSGAWLKVKGKKGTEAYVEQKLISEEDLNSAVDHHHHHH

SEQ ID NO: 335 - DNA, 2409 bp, Artificial Sequence
  Description of Artificial Sequence:Thermococcus species 9degreesN-7 mutant DNA polymerase, 9degreesN mutant
atgattctcgataccgactacatcaccgagaacgggaagcccgtgataagggtcttcaagaaggagaacggcgagtttaaaatcgagtacgacagaaccttcgagccctacttctacgcccttctgaaggacgattctgcgatagaggacgtcaagaaggtaaccgcaaagaggcacggaacggttgtcaaggtgaagcgcgccgagaaggtgcagaagaagttcctcggcaggccgatagaggtctggaagctctacttcaaccatcctcaggacgtcccggcgattcgagacaggatacgcgcccaccccgctgtcgttgacatctacgagtacgacatacccttcgccaagcgctacctcatcgacaagggcctgattccgatggagggcgacgaggagcttacgatgctcgccttcgcgatcgcaaccctctatcacgagggcgaggagttcggaaccgggccgattctcatgataagctacgccgacgggagcgaggcgagggtgataacctggaagaagattgaccttccgtacgttgacgtcgtctcgaccgagaaggagatgattaagcgcttcctccgcgtcgtcagggagaaggaccccgacgtgctcatcacctacaacggcgacaacttcgacttcgcctacctgaagaagcgctgtgaggaactcggaataaagttcacactcggcagggacgggagcgagccgaagatacagcgaatgggcgaccgctttgccgttgaggtgaagggcaggattcacttcgacctctaccccgtcataaggcgcacgataaacctcccgacctacacccttgaggccgtttacgaggccgtctttggaaagcccaaggagaaggtttacgcagaggagatagcgcaggcctgggagagcggggagggccttgaaagggttgcaagatactcgatggaggacgctaaggtgacctacgagctgggaagggagttcttcccgatggaggcccagctttcgaggcttataggccagagcctctgggacgtctcgcgctcgagcaccggaaatttggtggagtggttcctcctgcggaaggcctacaagaggaacgagctcgccccaaacaagcccgacgagagggagctcgcgagacggcgcgggggctacgctggcgggtacgttaaggaaccagagcggggattgtgggacaacattgtgtatttagacttccgctcgtggtatccttcaatcatcataacccacaacgtctcgccggataccctcaaccgcgagggctgtaaagagtacgacgtcgcccctgaggttggacacaagttctgcaaggacttccccggcttcatatgcagcctcctgggagatttgctcgaggagaggcagaagataaagcggaagatgaaggcaacggttgacccgctggagaagaaactcctcgtgtacaggcagtggcttataaaaatcctcgccaacagcttctacggctactacggctacgccaaggcccggtggtactgcaaggagtgcgccgagagcgttacggcctggggaagggagtatatagaaatggttatccgggaactcgaagaaaaattcggttttaaagttctctatgccgatacagacggtctccatgctaccattcccggagcagacgctgaaacagtcaagaaaaaagcaaaggagttcttaaaatacattaatccaaaactgcccggcctgctcgaacttgagtacgagggcttctacgtgaggggcttcttcgtcacgaagaagaagtacgctgtgatagacgaggagggcaagataaccacgaggggtcttgagattgtgaggcgcgactggagcgagatagcgaaggagacccaggccagggtcttagaggcgatactcaagcacggtgacgtcgaggaggccgttaggatagtcaaggaagtgacggaaaagctgagcaagtatgaggtcccgcccgagaagctggtaatccacgagcagataacgcgcgatttgagggattacaaagccaccggcccgcacgttgccgttgcgaagaggctcgcggcgcgtggagtgaaaatccggcccggcacggtgataagctacatcgtcctaaagggctctggaaggataggcgacagggcgattccagctgatgagttcgacccgacgaagcaccgctacgatgcggaatactacatcgagaaccaggttctcccggcggtggagaggattctaaaagccttcggctatcggaaggaggatttgcgctaccagaagacgaagcaggtcggctcgggcgcgtggctgaaggtgaaggggaagaagggtaccgaagcttacgtagaacaaaaactcatctcagaagaggatctgaatagcgccgtcgaccatcatcatcatcatcattga

SEQ ID NO: 336 - protein, 802 aa, Artificial Sequence
  Description of Artificial Sequence:Thermococcus species 9degreesN-7 mutant DNA polymerase, 9degreesN mutant
MILDTDYITENGKPVIRVFKKENGEFKIEYDRTFEPYFYALLKDDSAIEDVKKVTAKRHGTVVKVKRAEKVQKKFLGRPIEVWKLYFNHPQDVPAIRDRIRAHPAVVDIYEYDIPFAKRYLIDKGLIPMEGDEELTMLAFAIATLYHEGEEFGTGPILMISYADGSEARVITWKKIDLPYVDVVSTEKEMIKRFLRVVREKDPDVLITYNGDNFDFAYLKKRCEELGIKFTLGRDGSEPKIQRMGDRFAVEVKGRIHFDLYPVIRRTINLPTYTLEAVYEAVFGKPKEKVYAEEIAQAWESGEGLERVARYSMEDAKVTYELGREFFPMEAQLSRLIGQSLWDVSRSSTGNLVEWFLLRKAYKRNELAPNKPDERELARRRGGYAGGYVKEPERGLWDNIVYLDFRSWYPSIIITHNVSPDTLNREGCKEYDVAPEVGHKFCKDFPGFICSLLGDLLEERQKIKRKMKATVDPLEKKLLVYRQWLIKILANSFYGYYGYAKARWYCKECAESVTAWGREYIEMVIRELEEKFGFKVLYADTDGLHATIPGADAETVKKKAKEFLKYINPKLPGLLELEYEGFYVRGFFVTKKKYAVIDEEGKITTRGLEIVRRDWSEIAKETQARVLEAILKHGDVEEAVRIVKEVTEKLSKYEVPPEKLVIHEQITRDLRDYKATGPHVAVAKRLAARGVKIRPGTVISYIVLKGSGRIGDRAIPADEFDPTKHRYDAEYYIENQVLPAVERILKAFGYRKEDLRYQKTKQVGSGAWLKVKGKKGTEAYVEQKLISEEDLNSAVDHHHHHH

SEQ ID NO: 337 - DNA, 2409 bp, Artificial Sequence
  Description of Artificial Sequence:Thermococcus species 9degreesN-7 mutant DNA polymerase, 9degreesN mutant
atgattctcgataccgactacatcaccgagaacgggaagcccgtgataagggtcttcaagaaggagaacggcgagtttaaaatcgagtacgacagaaccttcgagccctacttctacgcccttctgaaggacgattctgcgatagaggacgtcaagaaggtaaccgcaaagaggcacggaacggttgtcaaggtgaagcgcgccgagaaggtgcagaagaagttcctcggcaggccgatagaggtctggaagctctacttcaaccatcctcaggacgtcccggcgattcgagacaggatacgcgcccaccccgctgtcgttgacatctacgagtacgacatacccttcgccaagcgctacctcatcgacaagggcctgattccgatggagggcgacgaggagcttacgatgctcgccttcgcgatcgcaaccctctatcacgagggcgaggagttcggaaccgggccgattctcatgataagctacgccgacgggagcgaggcgagggtgataacctggaagaagattgaccttccgtacgttgacgtcgtctcgaccgagaaggagatgattaagcgcttcctccgcgtcgtcagggagaaggaccccgacgtgctcatcacctacaacggcgacaacttcgacttcgcctacctgaagaagcgctgtgaggaactcggaataaagttcacactcggcagggacgggagcgagccgaagatacagcgaatgggcgaccgctttgccgttgaggtgaagggcaggattcacttcgacctctaccccgtcataaggcgcacgataaacctcccgacctacacccttgaggccgtttacgaggccgtctttggaaagcccaaggagaaggtttacgcagaggagatagcgcaggcctgggagagcggggagggccttgaaagggttgcaagatactcgatggaggacgctaaggtgacctacgagctgggaagggagttcttcccgatggaggcctccctttcgaggcttataggccagagcctctgggacgtctcgcgctcgagcaccggaaatttggtggagtggttcctcctgcggaaggcctacaagaggaacgagctcgccccaaacaagcccgacgagagggagctcgcgagacggcgcgggggctacgctggcgggtacgttaaggaaccagagcggggattgtgggacaacattgtgtatttagacttccgctcgtggtatccttcaatcatcataacccacaacgtctcgccggataccctcaaccgcgagggctgtaaagagtacgacgtcgcccctgaggttggacacaagttctgcaaggacttccccggcttcataccaagcctcctgggagatttgctcgaggagaggcagaagataaagcggaagatgaaggcaacggttgacccgctggagaagaaactcctcgattacaggatgtggcttataaaaatcctcgccaacagcttctacggctactacggctacgccaaggcccggtggtactgcaaggagtgcgccgagagcgttacggcctggggaagggagtatatagaaatggttatccgggaactcgaagaaaaattcggttttaaagttctctatgccgatacagacggtctccatgctaccattcccggagcagacgctgaaacagtcaagaaaaaagcaaaggagttcttaaaatacattaatccaaaactgcccggcctgctcgaacttgagtacgagggcttctacgtgaggggcttcttcgtcacgaagaagaagtacgctgtgatagacgaggagggcaagataaccacgaggggtcttgagattgtgaggcgcgactggagcgagatagcgaaggagacccaggccagggtcttagaggcgatactcaagcacggtgacgtcgaggaggccgttaggatagtcaaggaagtgacggaaaagctgagcaagtatgaggtcccgcccgagaagctggtaatccacgagcagataacgcgcgatttgagggattacaaagccaccggcccgcacgttgccgttgcgaagaggctcgcggcgcgtggagtgaaaatccggcccggcacggtgataagctacatcgtcctaaagggctctggaaggataggcgacagggcgattccagctgatgagttcgacccgacgaagcaccgctacgatgcggaatactacatcgagaaccaggttctcccggcggtggagaggattctaaaagccttcggctatcggaaggaggatttgcgctaccagaagacgaagcaggtcggctcgggcgcgtggctgaaggtgaaggggaagaagggtaccgaagcttacgtagaacaaaaactcatctcagaagaggatctgaatagcgccgtcgaccatcatcatcatcatcattga

SEQ ID NO: 338 - protein, 802 aa, Artificial Sequence
  Description of Artificial Sequence:Thermococcus species 9degreesN-7 mutant DNA polymerase, 9degreesN mutant
MILDTDYITENGKPVIRVFKKENGEFKIEYDRTFEPYFYALLKDDSAIEDVKKVTAKRHGTVVKVKRAEKVQKKFLGRPIEVWKLYFNHPQDVPAIRDRIRAHPAVVDIYEYDIPFAKRYLIDKGLIPMEGDEELTMLAFAIATLYHEGEEFGTGPILMISYADGSEARVITWKKIDLPYVDVVSTEKEMIKRFLRVVREKDPDVLITYNGDNFDFAYLKKRCEELGIKFTLGRDGSEPKIQRMGDRFAVEVKGRIHFDLYPVIRRTINLPTYTLEAVYEAVFGKPKEKVYAEEIAQAWESGEGLERVARYSMEDAKVTYELGREFFPMEASLSRLIGQSLWDVSRSSTGNLVEWFLLRKAYKRNELAPNKPDERELARRRGGYAGGYVKEPERGLWDNIVYLDFRSWYPSIIITHNVSPDTLNREGCKEYDVAPEVGHKFCKDFPGFIPSLLGDLLEERQKIKRKMKATVDPLEKKLLDYRMWLIKILANSFYGYYGYAKARWYCKECAESVTAWGREYIEMVIRELEEKFGFKVLYADTDGLHATIPGADAETVKKKAKEFLKYINPKLPGLLELEYEGFYVRGFFVTKKKYAVIDEEGKITTRGLEIVRRDWSEIAKETQARVLEAILKHGDVEEAVRIVKEVTEKLSKYEVPPEKLVIHEQITRDLRDYKATGPHVAVAKRLAARGVKIRPGTVISYIVLKGSGRIGDRAIPADEFDPTKHRYDAEYYIENQVLPAVERILKAFGYRKEDLRYQKTKQVGSGAWLKVKGKKGTEAYVEQKLISEEDLNSAVDHHHHHH

SEQ ID NO: 339 - DNA, 2409 bp, Artificial Sequence
  Description of Artificial Sequence:Thermococcus species 9degreesN-7 mutant DNA polymerase, 9degreesN mutant
atgattctcgataccgactacatcaccgagaacgggaagcccgtgataagggtcttcaagaaggagaacggcgagtttaaaatcgagtacgacagaaccttcgagccctacttctacgcccttctgaaggacgattctgcgatagaggacgtcaagaaggtaaccgcaaagaggcacggaacggttgtcaaggtgaagcgcgccgagaaggtgcagaagaagttcctcggcaggccgatagaggtctggaagctctacttcaaccatcctcaggacgtcccggcgattcgagacaggatacgcgcccaccccgctgtcgttgacatctacgagtacgacatacccttcgccaagcgctacctcatcgacaagggcctgattccgatggagggcgacgaggagcttacgatgctcgccttcgcgatcgcaaccctctatcacgagggcgaggagttcggaaccgggccgattctcatgataagctacgccgacgggagcgaggcgagggtgataacctggaagaagattgaccttccgtacgttgacgtcgtctcgaccgagaaggagatgattaagcgcttcctccgcgtcgtcagggagaaggaccccgacgtgctcatcacctacaacggcgacaacttcgacttcgcctacctgaagaagcgctgtgaggaactcggaataaagttcacactcggcagggacgggagcgagccgaagatacagcgaatgggcgaccgctttgccgttgaggtgaagggcaggattcacttcgacctctaccccgtcataaggcgcacgataaacctcccgacctacacccttgaggccgtttacgaggccgtctttggaaagcccaaggagaaggtttacgcagaggagatagcgcaggcctgggagagcggggagggccttgaaagggttgcaagatactcgatggaggacgctaaggtgacctacgagctgggaagggagttcttcccgatggaggcccagctttcgaggcttataggccagagcctctgggacgtctcgcgctcgagcaccggaaatttggtggagtggttcctcctgcggaaggcctacaagaggaacgagctcgccccaaacaagcccgacgagagggagctcgcgagacggcgcgggggctacgctggcgggtacgttaaggaaccagagcggggattgtgggacaacattgtgtatttagacttccgctcgtggtatccttcaatcatcataacccacaacgtctcgccggataccctcaaccgcgagggctgtaaagagtacgacgtcgcccctgaggttggacacaagttctgcaaggacttccccggcttcataccaagcctcctgggagatttgctcgaggagagggacaagataaagcggaagatgaaggcaacggttgacccgctggagaagaaactcctcgattacaggatgtggcttataaaaatcctcgccaacagcttctacggctactacggctacgccaaggcccggtggtactgcaaggagtgcgccgagagcgttacggcctggggaagggagtatatagaaatggttatccgggaactcgaagaaaaattcggttttaaagttctctatgccgatacagacggtctccatgctaccattcccggagcagacgctgaaacagtcaagaaaaaagcaaaggagttcttaaaatacattaatccaaaactgcccggcctgctcgaacttgagtacgagggcttctacgtgaggggcttcttcgtcacgaagaagaagtacgctgtgatagacgaggagggcaagataaccacgaggggtcttgagattgtgaggcgcgactggagcgagatagcgaaggagacccaggccagggtcttagaggcgatactcaagcacggtgacgtcgaggaggccgttaggatagtcaaggaagtgacggaaaagctgagcaagtatgaggtcccgcccgagaagctggtaatccacgagcagataacgcgcgatttgagggattacaaagccaccggcccgcacgttgccgttgcgaagaggctcgcggcgcgtggagtgaaaatccggcccggcacggtgataagctacatcgtcctaaagggctctggaaggataggcgacagggcgattccagctgatgagttcgacccgacgaagcaccgctacgatgcggaatactacatcgagaaccaggttctcccggcggtggagaggattctaaaagccttcggctatcggaaggaggatttgcgctaccagaagacgaagcaggtcggctcgggcgcgtggctgaaggtgaaggggaagaagggtaccgaagcttacgtagaacaaaaactcatctcagaagaggatctgaatagcgccgtcgaccatcatcatcatcatcattga

SEQ ID NO: 340 - protein, 802 aa, Artificial Sequence
  Description of Artificial Sequence:Thermococcus species 9degreesN-7 mutant DNA polymerase, 9degreesN mutant
MILDTDYITENGKPVIRVFKKENGEFKIEYDRTFEPYFYALLKDDSAIEDVKKVTAKRHGTVVKVKRAEKVQKKFLGRPIEVWKLYFNHPQDVPAIRDRIRAHPAVVDIYEYDIPFAKRYLIDKGLIPMEGDEELTMLAFAIATLYHEGEEFGTGPILMISYADGSEARVITWKKIDLPYVDVVSTEKEMIKRFLRVVREKDPDVLITYNGDNFDFAYLKKRCEELGIKFTLGRDGSEPKIQRMGDRFAVEVKGRIHFDLYPVIRRTINLPTYTLEAVYEAVFGKPKEKVYAEEIAQAWESGEGLERVARYSMEDAKVTYELGREFFPMEAQLSRLIGQSLWDVSRSSTGNLVEWFLLRKAYKRNELAPNKPDERELARRRGGYAGGYVKEPERGLWDNIVYLDFRSWYPSIIITHNVSPDTLNREGCKEYDVAPEVGHKFCKDFPGFIPSLLGDLLEERDKIKRKMKATVDPLEKKLLDYRMWLIKILANSFYGYYGYAKARWYCKECAESVTAWGREYIEMVIRELEEKFGFKVLYADTDGLHATIPGADAETVKKKAKEFLKYINPKLPGLLELEYEGFYVRGFFVTKKKYAVIDEEGKITTRGLEIVRRDWSEIAKETQARVLEAILKHGDVEEAVRIVKEVTEKLSKYEVPPEKLVIHEQITRDLRDYKATGPHVAVAKRLAARGVKIRPGTVISYIVLKGSGRIGDRAIPADEFDPTKHRYDAEYYIENQVLPAVERILKAFGYRKEDLRYQKTKQVGSGAWLKVKGKKGTEAYVEQKLISEEDLNSAVDHHHHHH

SEQ ID NO: 341 - DNA, 2409 bp, Artificial Sequence
  Description of Artificial Sequence:Thermococcus species 9degreesN-7 mutant DNA polymerase, 9degreesN mutant
atgattctcgataccgactacatcaccgagaacgggaagcccgtgataagggtcttcaagaaggagaacggcgagtttaaaatcgagtacgacagaaccttcgagccctacttctacgcccttctgaaggacgattctgcgatagaggacgtcaagaaggtaaccgcaaagaggcacggaacggttgtcaaggtgaagcgcgccgagaaggtgcagaagaagttcctcggcaggccgatagaggtctggaagctctacttcaaccatcctcaggacgtcccggcgattcgagacaggatacgcgcccaccccgctgtcgttgacatctacgagtacgacatacccttcgccaagcgctacctcatcgacaagggcctgattccgatggagggcgacgaggagcttacgatgctcgccttcgcgatcgcaaccctctatcacgagggcgaggagttcggaaccgggccgattctcatgataagctacgccgacgggagcgaggcgagggtgataacctggaagaagattgaccttccgtacgttgacgtcgtctcgaccgagaaggagatgattaagcgcttcctccgcgtcgtcagggagaaggaccccgacgtgctcatcacctacaacggcgacaacttcgacttcgcctacctgaagaagcgctgtgaggaactcggaataaagttcacactcggcagggacgggagcgagccgaagatacagcgaatgggcgaccgctttgccgttgaggtgaagggcaggattcacttcgacctctaccccgtcataaggcgcacgataaacctcccgacctacacccttgaggccgtttacgaggccgtctttggaaagcccaaggagaaggtttacgcagaggagatagcgcaggcctgggagagcggggagggccttgaaagggttgcaagatactcgatggaggacgctaaggtgacctacgagctgggaagggagttcttcccgatggaggcccagctttcgaggcttataggccagagcctctgggacgtctcgcgctcgagcaccggaaatttggtggagtggttcctcctgcggaaggcctacaagaggaacgagctcgccccaaacaagcccgacgagagggagctcgcgagacggcgcgggggctacgctggcgggtacgttaaggaaccagagcggggattgtgggacaacattgtgtatttagacttccgctcgtggtatccttcaatcatcataacccacaacgtctcgccggataccctcaaccgcgagggctgtaaagagtacgacgtcgcccctgaggttggacacaagttctgcaaggacttccccggcttcataccaagcctcctgggagatttgctcgaggagaagcagaagataaagcggaagatgaaggcaacggttgacccgctggagaagaaactcctcgattacaggatgtggcttataaaaatcctcgccaacagcttctacggctactacggctacgccaaggcccggtggtactgcaaggagtgcgccgagagcgttacggcctggggaagggagtatatagaaatggttatccgggaactcgaagaaaaattcggttttaaagttctctatgccgatacagacggtctccatgctaccattcccggagcagacgctgaaacagtcaagaaaaaagcaaaggagttcttaaaatacattaatccaaaactgcccggcctgctcgaacttgagtacgagggcttctacgtgaggggcttcttcgtcacgaagaagaagtacgctgtgatagacgaggagggcaagataaccacgaggggtcttgagattgtgaggcgcgactggagcgagatagcgaaggagacccaggccagggtcttagaggcgatactcaagcacggtgacgtcgaggaggccgttaggatagtcaaggaagtgacggaaaagctgagcaagtatgaggtcccgcccgagaagctggtaatccacgagcagataacgcgcgatttgagggattacaaagccaccggcccgcacgttgccgttgcgaagaggctcgcggcgcgtggagtgaaaatccggcccggcacggtgataagctacatcgtcctaaagggctctggaaggataggcgacagggcgattccagctgatgagttcgacccgacgaagcaccgctacgatgcggaatactacatcgagaaccaggttctcccggcggtggagaggattctaaaagccttcggctatcggaaggaggatttgcgctaccagaagacgaagcaggtcggctcgggcgcgtggctgaaggtgaaggggaagaagggtaccgaagcttacgtagaacaaaaactcatctcagaagaggatctgaatagcgccgtcgaccatcatcatcatcatcattga

SEQ ID NO: 342 - protein, 802 aa, Artificial Sequence
  Description of Artificial Sequence:Thermococcus species 9degreesN-7 mutant DNA polymerase, 9degreesN mutant
MILDTDYITENGKPVIRVFKKENGEFKIEYDRTFEPYFYALLKDDSAIEDVKKVTAKRHGTVVKVKRAEKVQKKFLGRPIEVWKLYFNHPQDVPAIRDRIRAHPAVVDIYEYDIPFAKRYLIDKGLIPMEGDEELTMLAFAIATLYHEGEEFGTGPILMISYADGSEARVITWKKIDLPYVDVVSTEKEMIKRFLRVVREKDPDVLITYNGDNFDFAYLKKRCEELGIKFTLGRDGSEPKIQRMGDRFAVEVKGRIHFDLYPVIRRTINLPTYTLEAVYEAVFGKPKEKVYAEEIAQAWESGEGLERVARYSMEDAKVTYELGREFFPMEAQLSRLIGQSLWDVSRSSTGNLVEWFLLRKAYKRNELAPNKPDERELARRRGGYAGGYVKEPERGLWDNIVYLDFRSWYPSIIITHNVSPDTLNREGCKEYDVAPEVGHKFCKDFPGFIPSLLGDLLEEKQKIKRKMKATVDPLEKKLLDYRMWLIKILANSFYGYYGYAKARWYCKECAESVTAWGREYIEMVIRELEEKFGFKVLYADTDGLHATIPGADAETVKKKAKEFLKYINPKLPGLLELEYEGFYVRGFFVTKKKYAVIDEEGKITTRGLEIVRRDWSEIAKETQARVLEAILKHGDVEEAVRIVKEVTEKLSKYEVPPEKLVIHEQITRDLRDYKATGPHVAVAKRLAARGVKIRPGTVISYIVLKGSGRIGDRAIPADEFDPTKHRYDAEYYIENQVLPAVERILKAFGYRKEDLRYQKTKQVGSGAWLKVKGKKGTEAYVEQKLISEEDLNSAVDHHHHHH

SEQ ID NO: 343 - DNA, 2409 bp, Artificial Sequence
  Description of Artificial Sequence:Thermococcus species 9degreesN-7 mutant DNA polymerase, 9degreesN mutant
atgattctcgataccgactacatcaccgagaacgggaagcccgtgataagggtcttcaagaaggagaacggcgagtttaaaatcgagtacgacagaaccttcgagccctacttctacgcccttctgaaggacgattctgcgatagaggacgtcaagaaggtaaccgcaaagaggcacggaacggttgtcaaggtgaagcgcgccgagaaggtgcagaagaagttcctcggcaggccgatagaggtctggaagctctacttcaaccatcctcaggacgtcccggcgattcgagacaggatacgcgcccaccccgctgtcgttgacatctacgagtacgacatacccttcgccaagcgctacctcatcgacaagggcctgattccgatggagggcgacgaggagcttacgatgctcgccttcgcgatcgcaaccctctatcacgagggcgaggagttcggaaccgggccgattctcatgataagctacgccgacgggagcgaggcgagggtgataacctggaagaagattgaccttccgtacgttgacgtcgtctcgaccgagaaggagatgattaagcgcttcctccgcgtcgtcagggagaaggaccccgacgtgctcatcacctacaacggcgacaacttcgacttcgcctacctgaagaagcgctgtgaggaactcggaataaagttcacactcggcagggacgggagcgagccgaagatacagcgaatgggcgaccgctttgccgttgaggtgaagggcaggattcacttcgacctctaccccgtcataaggcgcacgataaacctcccgacctacacccttgaggccgtttacgaggccgtctttggaaagcccaaggagaaggtttacgcagaggagatagcgcaggcctgggagagcggggagggccttgaaagggttgcaagatactcgatggaggacgctaaggtgacctacgagctgggaagggagttcttcccgatggaggcccagctttcgaggcttataggccagagcctctgggacgtctcgcgctcgagcaccggaaatttggtggagtggttcctcctgcggaaggcctacaagaggaacgagctcgccccaaacaagcccgacgagagggagctcgcgagacggcgcgggggctacgctggcgggtacgttaaggaaccagagcggggattgtgggacaacattgtgtatttagacttccgctcgtggtatccttcaatcatcataacccacaacgtctcgccggataccctcaaccgcgagggctgtaaagagtacgacgtcgcccctgaggttggacacaagttctgcaaggacttccccggcttcataccaagcctcctgggagatttgctcgaggagccacagaagataaagcggaagatgaaggcaacggttgacccgctggagaagaaactcctcgattacaggatgtggcttataaaaatcctcgccaacagcttctacggctactacggctacgccaaggcccggtggtactgcaaggagtgcgccgagagcgttacggcctggggaagggagtatatagaaatggttatccgggaactcgaagaaaaattcggttttaaagttctctatgccgatacagacggtctccatgctaccattcccggagcagacgctgaaacagtcaagaaaaaagcaaaggagttcttaaaatacattaatccaaaactgcccggcctgctcgaacttgagtacgagggcttctacgtgaggggcttcttcgtcacgaagaagaagtacgctgtgatagacgaggagggcaagataaccacgaggggtcttgagattgtgaggcgcgactggagcgagatagcgaaggagacccaggccagggtcttagaggcgatactcaagcacggtgacgtcgaggaggccgttaggatagtcaaggaagtgacggaaaagctgagcaagtatgaggtcccgcccgagaagctggtaatccacgagcagataacgcgcgatttgagggattacaaagccaccggcccgcacgttgccgttgcgaagaggctcgcggcgcgtggagtgaaaatccggcccggcacggtgataagctacatcgtcctaaagggctctggaaggataggcgacagggcgattccagctgatgagttcgacccgacgaagcaccgctacgatgcggaatactacatcgagaaccaggttctcccggcggtggagaggattctaaaagccttcggctatcggaaggaggatttgcgctaccagaagacgaagcaggtcggctcgggcgcgtggctgaaggtgaaggggaagaagggtaccgaagcttacgtagaacaaaaactcatctcagaagaggatctgaatagcgccgtcgaccatcatcatcatcatcattga

SEQ ID NO: 344 - protein, 802 aa, Artificial Sequence
  Description of Artificial Sequence:Thermococcus species 9degreesN-7 mutant DNA polymerase, 9degreesN mutant
MILDTDYITENGKPVIRVFKKENGEFKIEYDRTFEPYFYALLKDDSAIEDVKKVTAKRHGTVVKVKRAEKVQKKFLGRPIEVWKLYFNHPQDVPAIRDRIRAHPAVVDIYEYDIPFAKRYLIDKGLIPMEGDEELTMLAFAIATLYHEGEEFGTGPILMISYADGSEARVITWKKIDLPYVDVVSTEKEMIKRFLRVVREKDPDVLITYNGDNFDFAYLKKRCEELGIKFTLGRDGSEPKIQRMGDRFAVEVKGRIHFDLYPVIRRTINLPTYTLEAVYEAVFGKPKEKVYAEEIAQAWESGEGLERVARYSMEDAKVTYELGREFFPMEAQLSRLIGQSLWDVSRSSTGNLVEWFLLRKAYKRNELAPNKPDERELARRRGGYAGGYVKEPERGLWDNIVYLDFRSWYPSIIITHNVSPDTLNREGCKEYDVAPEVGHKFCKDFPGFIPSLLGDLLEEPQKIKRKMKATVDPLEKKLLDYRMWLIKILANSFYGYYGYAKARWYCKECAESVTAWGREYIEMVIRELEEKFGFKVLYADTDGLHATIPGADAETVKKKAKEFLKYINPKLPGLLELEYEGFYVRGFFVTKKKYAVIDEEGKITTRGLEIVRRDWSEIAKETQARVLEAILKHGDVEEAVRIVKEVTEKLSKYEVPPEKLVIHEQITRDLRDYKATGPHVAVAKRLAARGVKIRPGTVISYIVLKGSGRIGDRAIPADEFDPTKHRYDAEYYIENQVLPAVERILKAFGYRKEDLRYQKTKQVGSGAWLKVKGKKGTEAYVEQKLISEEDLNSAVDHHHHHH

SEQ ID NO: 345 - DNA, 2409 bp, Artificial Sequence
  Description of Artificial Sequence:Thermococcus species 9degreesN-7 mutant DNA polymerase, 9degreesN mutant
atgattctcgataccgactacatcaccgagaacgggaagcccgtgataagggtcttcaagaaggagaacggcgagtttaaaatcgagtacgacagaaccttcgagccctacttctacgcccttctgaaggacgattctgcgatagaggacgtcaagaaggtaaccgcaaagaggcacggaacggttgtcaaggtgaagcgcgccgagaaggtgcagaagaagttcctcggcaggccgatagaggtctggaagctctacttcaaccatcctcaggacgtcccggcgattcgagacaggatacgcgcccaccccgctgtcgttgacatctacgagtacgacatacccttcgccaagcgctacctcatcgacaagggcctgattccgatggagggcgacgaggagcttacgatgctcgccttcgcgatcgcaaccctctatcacgagggcgaggagttcggaaccgggccgattctcatgataagctacgccgacgggagcgaggcgagggtgataacctggaagaagattgaccttccgtacgttgacgtcgtctcgaccgagaaggagatgattaagcgcttcctccgcgtcgtcagggagaaggaccccgacgtgctcatcacctacaacggcgacaacttcgacttcgcctacctgaagaagcgctgtgaggaactcggaataaagttcacactcggcagggacgggagcgagccgaagatacagcgaatgggcgaccgctttgccgttgaggtgaagggcaggattcacttcgacctctaccccgtcataaggcgcacgataaacctcccgacctacacccttgaggccgtttacgaggccgtctttggaaagcccaaggagaaggtttacgcagaggagatagcgcaggcctgggagagcggggagggccttgaaagggttgcaagatactcgatggaggacgctaaggtgacctacgagctgggaagggagttcttcccgatggaggcccagctttcgaggcttataggccagagcctctgggacgtctcgcgctcgagcaccggaaatttggtggagtggttcctcctgcggaaggcctacaagaggaacgagctcgccccaaacaagcccgacgagagggagctcgcgagacggcgcgggggctacgctggcgggtacgttaaggaaccagagcggggattgtgggacaacattgtgtatttagacttccgctcgtggtatccttcaatcatcataacccacaacgtctcgccggataccctcaaccgcgagggctgtaaagagtacgacgtcgcccctgaggttggacacaagttctgcaaggacttccccggcttcataccaagcctcctgggagatttgctcgaggaggtccagaagataaagcggaagatgaaggcaacggttgacccgctggagaagaaactcctcgattacaggatgtggcttataaaaatcctcgccaacagcttctacggctactacggctacgccaaggcccggtggtactgcaaggagtgcgccgagagcgttacggcctggggaagggagtatatagaaatggttatccgggaactcgaagaaaaattcggttttaaagttctctatgccgatacagacggtctccatgctaccattcccggagcagacgctgaaacagtcaagaaaaaagcaaaggagttcttaaaatacattaatccaaaactgcccggcctgctcgaacttgagtacgagggcttctacgtgaggggcttcttcgtcacgaagaagaagtacgctgtgatagacgaggagggcaagataaccacgaggggtcttgagattgtgaggcgcgactggagcgagatagcgaaggagacccaggccagggtcttagaggcgatactcaagcacggtgacgtcgaggaggccgttaggatagtcaaggaagtgacggaaaagctgagcaagtatgaggtcccgcccgagaagctggtaatccacgagcagataacgcgcgatttgagggattacaaagccaccggcccgcacgttgccgttgcgaagaggctcgcggcgcgtggagtgaaaatccggcccggcacggtgataagctacatcgtcctaaagggctctggaaggataggcgacagggcgattccagctgatgagttcgacccgacgaagcaccgctacgatgcggaatactacatcgagaaccaggttctcccggcggtggagaggattctaaaagccttcggctatcggaaggaggatttgcgctaccagaagacgaagcaggtcggctcgggcgcgtggctgaaggtgaaggggaagaagggtaccgaagcttacgtagaacaaaaactcatctcagaagaggatctgaatagcgccgtcgaccatcatcatcatcatcattga

SEQ ID NO: 346 - protein, 802 aa, Artificial Sequence
  Description of Artificial Sequence:Thermococcus species 9degreesN-7 mutant DNA polymerase, 9degreesN mutant
MILDTDYITENGKPVIRVFKKENGEFKIEYDRTFEPYFYALLKDDSAIEDVKKVTAKRHGTVVKVKRAEKVQKKFLGRPIEVWKLYFNHPQDVPAIRDRIRAHPAVVDIYEYDIPFAKRYLIDKGLIPMEGDEELTMLAFAIATLYHEGEEFGTGPILMISYADGSEARVITWKKIDLPYVDVVSTEKEMIKRFLRVVREKDPDVLITYNGDNFDFAYLKKRCEELGIKFTLGRDGSEPKIQRMGDRFAVEVKGRIHFDLYPVIRRTINLPTYTLEAVYEAVFGKPKEKVYAEEIAQAWESGEGLERVARYSMEDAKVTYELGREFFPMEAQLSRLIGQSLWDVSRSSTGNLVEWFLLRKAYKRNELAPNKPDERELARRRGGYAGGYVKEPERGLWDNIVYLDFRSWYPSIIITHNVSPDTLNREGCKEYDVAPEVGHKFCKDFPGFIPSLLGDLLEEVQKIKRKMKATVDPLEKKLLDYRMWLIKILANSFYGYYGYAKARWYCKECAESVTAWGREYIEMVIRELEEKFGFKVLYADTDGLHATIPGADAETVKKKAKEFLKYINPKLPGLLELEYEGFYVRGFFVTKKKYAVIDEEGKITTRGLEIVRRDWSEIAKETQARVLEAILKHGDVEEAVRIVKEVTEKLSKYEVPPEKLVIHEQITRDLRDYKATGPHVAVAKRLAARGVKIRPGTVISYIVLKGSGRIGDRAIPADEFDPTKHRYDAEYYIENQVLPAVERILKAFGYRKEDLRYQKTKQVGSGAWLKVKGKKGTEAYVEQKLISEEDLNSAVDHHHHHH

SEQ ID NO: 347 - DNA, 2409 bp, Artificial Sequence
  Description of Artificial Sequence:Thermococcus species 9degreesN-7 mutant DNA polymerase, 9degreesN mutant
atgattctcgataccgactacatcaccgagaacgggaagcccgtgataagggtcttcaagaaggagaacggcgagtttaaaatcgagtacgacagaaccttcgagccctacttctacgcccttctgaaggacgattctgcgatagaggacgtcaagaaggtaaccgcaaagaggcacggaacggttgtcaaggtgaagcgcgccgagaaggtgcagaagaagttcctcggcaggccgatagaggtctggaagctctacttcaaccatcctcaggacgtcccggcgattcgagacaggatacgcgcccaccccgctgtcgttgacatctacgagtacgacatacccttcgccaagcgctacctcatcgacaagggcctgattccgatggagggcgacgaggagcttacgatgctcgccttcgcgatcgcaaccctctatcacgagggcgaggagttcggaaccgggccgattctcatgataagctacgccgacgggagcgaggcgagggtgataacctggaagaagattgaccttccgtacgttgacgtcgtctcgaccgagaaggagatgattaagcgcttcctccgcgtcgtcagggagaaggaccccgacgtgctcatcacctacaacggcgacaacttcgacttcgcctacctgaagaagcgctgtgaggaactcggaataaagttcacactcggcagggacgggagcgagccgaagatacagcgaatgggcgaccgctttgccgttgaggtgaagggcaggattcacttcgacctctaccccgtcataaggcgcacgataaacctcccgacctacacccttgaggccgtttacgaggccgtctttggaaagcccaaggagaaggtttacgcagaggagatagcgcaggcctgggagagcggggagggccttgaaagggttgcaagatactcgatggaggacgctaaggtgacctacgagctgggaagggagttcttcccgatggaggcccagctttcgaggcttataggccagagcctctgggacgtctcgcgctcgagcaccggaaatttggtggagtggttcctcctgcggaaggcctacaagaggaacgagctcgccccaaacaagcccgacgagagggagctcgcgagacggcgcgggggctacgctggcgggtacgttaaggaaccagagcggggattgtgggacaacattgtgtatttagacttccgctcgtggtatccttcaatcatcataacccacaacgtctcgccggataccctcaaccgcgagggctgtaaagagtacgacgtcgcccctgaggttggacacaagttctgcaaggacttccccggcttcataccaagcctcctgggagatttgctcgaggagcttcagaagataaagcggaagatgaaggcaacggttgacccgctggagaagaaactcctcgattacaggatgtggcttataaaaatcctcgccaacagcttctacggctactacggctacgccaaggcccggtggtactgcaaggagtgcgccgagagcgttacggcctggggaagggagtatatagaaatggttatccgggaactcgaagaaaaattcggttttaaagttctctatgccgatacagacggtctccatgctaccattcccggagcagacgctgaaacagtcaagaaaaaagcaaaggagttcttaaaatacattaatccaaaactgcccggcctgctcgaacttgagtacgagggcttctacgtgaggggcttcttcgtcacgaagaagaagtacgctgtgatagacgaggagggcaagataaccacgaggggtcttgagattgtgaggcgcgactggagcgagatagcgaaggagacccaggccagggtcttagaggcgatactcaagcacggtgacgtcgaggaggccgttaggatagtcaaggaagtgacggaaaagctgagcaagtatgaggtcccgcccgagaagctggtaatccacgagcagataacgcgcgatttgagggattacaaagccaccggcccgcacgttgccgttgcgaagaggctcgcggcgcgtggagtgaaaatccggcccggcacggtgataagctacatcgtcctaaagggctctggaaggataggcgacagggcgattccagctgatgagttcgacccgacgaagcaccgctacgatgcggaatactacatcgagaaccaggttctcccggcggtggagaggattctaaaagccttcggctatcggaaggaggatttgcgctaccagaagacgaagcaggtcggctcgggcgcgtggctgaaggtgaaggggaagaagggtaccgaagcttacgtagaacaaaaactcatctcagaagaggatctgaatagcgccgtcgaccatcatcatcatcatcattga

SEQ ID NO: 348 - protein, 802 aa, Artificial Sequence
  Description of Artificial Sequence:Thermococcus species 9degreesN-7 mutant DNA polymerase, 9degreesN mutant
MILDTDYITENGKPVIRVFKKENGEFKIEYDRTFEPYFYALLKDDSAIEDVKKVTAKRHGTVVKVKRAEKVQKKFLGRPIEVWKLYFNHPQDVPAIRDRIRAHPAVVDIYEYDIPFAKRYLIDKGLIPMEGDEELTMLAFAIATLYHEGEEFGTGPILMISYADGSEARVITWKKIDLPYVDVVSTEKEMIKRFLRVVREKDPDVLITYNGDNFDFAYLKKRCEELGIKFTLGRDGSEPKIQRMGDRFAVEVKGRIHFDLYPVIRRTINLPTYTLEAVYEAVFGKPKEKVYAEEIAQAWESGEGLERVARYSMEDAKVTYELGREFFPMEAQLSRLIGQSLWDVSRSSTGNLVEWFLLRKAYKRNELAPNKPDERELARRRGGYAGGYVKEPERGLWDNIVYLDFRSWYPSIIITHNVSPDTLNREGCKEYDVAPEVGHKFCKDFPGFIPSLLGDLLEELQKIKRKMKATVDPLEKKLLDYRMWLIKILANSFYGYYGYAKARWYCKECAESVTAWGREYIEMVIRELEEKFGFKVLYADTDGLHATIPGADAETVKKKAKEFLKYINPKLPGLLELEYEGFYVRGFFVTKKKYAVIDEEGKITTRGLEIVRRDWSEIAKETQARVLEAILKHGDVEEAVRIVKEVTEKLSKYEVPPEKLVIHEQITRDLRDYKATGPHVAVAKRLAARGVKIRPGTVISYIVLKGSGRIGDRAIPADEFDPTKHRYDAEYYIENQVLPAVERILKAFGYRKEDLRYQKTKQVGSGAWLKVKGKKGTEAYVEQKLISEEDLNSAVDHHHHHH

SEQ ID NO: 349 - DNA, 2409 bp, Artificial Sequence
  Description of Artificial Sequence:Thermococcus species 9degreesN-7 mutant DNA polymerase, 9degreesN mutant
atgattctcgataccgactacatcaccgagaacgggaagcccgtgataagggtcttcaagaaggagaacggcgagtttaaaatcgagtacgacagaaccttcgagccctacttctacgcccttctgaaggacgattctgcgatagaggacgtcaagaaggtaaccgcaaagaggcacggaacggttgtcaaggtgaagcgcgccgagaaggtgcagaagaagttcctcggcaggccgatagaggtctggaagctctacttcaaccatcctcaggacgtcccggcgattcgagacaggatacgcgcccaccccgctgtcgttgacatctacgagtacgacatacccttcgccaagcgctacctcatcgacaagggcctgattccgatggagggcgacgaggagcttacgatgctcgccttcgcgatcgcaaccctctatcacgagggcgaggagttcggaaccgggccgattctcatgataagctacgccgacgggagcgaggcgagggtgataacctggaagaagattgaccttccgtacgttgacgtcgtctcgaccgagaaggagatgattaagcgcttcctccgcgtcgtcagggagaaggaccccgacgtgctcatcacctacaacggcgacaacttcgacttcgcctacctgaagaagcgctgtgaggaactcggaataaagttcacactcggcagggacgggagcgagccgaagatacagcgaatgggcgaccgctttgccgttgaggtgaagggcaggattcacttcgacctctaccccgtcataaggcgcacgataaacctcccgacctacacccttgaggccgtttacgaggccgtctttggaaagcccaaggagaaggtttacgcagaggagatagcgcaggcctgggagagcggggagggccttgaaagggttgcaagatactcgatggaggacgctaaggtgacctacgagctgggaagggagttcttcccgatggaggcccagctttcgaggcttataggccagagcctctgggacgtctcgcgctcgagcaccggaaatttggtggagtggttcctcctgcggaaggcctacaagaggaacgagctcgccccaaacaagcccgacgagagggagctcgcgagacggcgcgggggctacgctggcgggtacgttaaggaaccagagcggggattgtgggacaacattgtgtatttagacttccgctcgtggtatccttcaatcatcataacccacaacgtctcgccggataccctcaaccgcgagggctgtaaagagtacgacgtcgcccctgaggttggacacaagttctgcaaggacttccccggcttcataccaagcctcctgggagatttgctcgaggagggacagaagataaagcggaagatgaaggcaacggttgacccgctggagaagaaactcctcgattacaggatgtggcttataaaaatcctcgccaacagcttctacggctactacggctacgccaaggcccggtggtactgcaaggagtgcgccgagagcgttacggcctggggaagggagtatatagaaatggttatccgggaactcgaagaaaaattcggttttaaagttctctatgccgatacagacggtctccatgctaccattcccggagcagacgctgaaacagtcaagaaaaaagcaaaggagttcttaaaatacattaatccaaaactgcccggcctgctcgaacttgagtacgagggcttctacgtgaggggcttcttcgtcacgaagaagaagtacgctgtgatagacgaggagggcaagataaccacgaggggtcttgagattgtgaggcgcgactggagcgagatagcgaaggagacccaggccagggtcttagaggcgatactcaagcacggtgacgtcgaggaggccgttaggatagtcaaggaagtgacggaaaagctgagcaagtatgaggtcccgcccgagaagctggtaatccacgagcagataacgcgcgatttgagggattacaaagccaccggcccgcacgttgccgttgcgaagaggctcgcggcgcgtggagtgaaaatccggcccggcacggtgataagctacatcgtcctaaagggctctggaaggataggcgacagggcgattccagctgatgagttcgacccgacgaagcaccgctacgatgcggaatactacatcgagaaccaggttctcccggcggtggagaggattctaaaagccttcggctatcggaaggaggatttgcgctaccagaagacgaagcaggtcggctcgggcgcgtggctgaaggtgaaggggaagaagggtaccgaagcttacgtagaacaaaaactcatctcagaagaggatctgaatagcgccgtcgaccatcatcatcatcatcattga

SEQ ID NO: 350 - protein, 802 aa, Artificial Sequence
  Description of Artificial Sequence:Thermococcus species 9degreesN-7 mutant DNA polymerase, 9degreesN mutant
MILDTDYITENGKPVIRVFKKENGEFKIEYDRTFEPYFYALLKDDSAIEDVKKVTAKRHGTVVKVKRAEKVQKKFLGRPIEVWKLYFNHPQDVPAIRDRIRAHPAVVDIYEYDIPFAKRYLIDKGLIPMEGDEELTMLAFAIATLYHEGEEFGTGPILMISYADGSEARVITWKKIDLPYVDVVSTEKEMIKRFLRVVREKDPDVLITYNGDNFDFAYLKKRCEELGIKFTLGRDGSEPKIQRMGDRFAVEVKGRIHFDLYPVIRRTINLPTYTLEAVYEAVFGKPKEKVYAEEIAQAWESGEGLERVARYSMEDAKVTYELGREFFPMEAQLSRLIGQSLWDVSRSSTGNLVEWFLLRKAYKRNELAPNKPDERELARRRGGYAGGYVKEPERGLWDNIVYLDFRSWYPSIIITHNVSPDTLNREGCKEYDVAPEVGHKFCKDFPGFIPSLLGDLLEEGQKIKRKMKATVDPLEKKLLDYRMWLIKILANSFYGYYGYAKARWYCKECAESVTAWGREYIEMVIRELEEKFGFKVLYADTDGLHATIPGADAETVKKKAKEFLKYINPKLPGLLELEYEGFYVRGFFVTKKKYAVIDEEGKITTRGLEIVRRDWSEIAKETQARVLEAILKHGDVEEAVRIVKEVTEKLSKYEVPPEKLVIHEQITRDLRDYKATGPHVAVAKRLAARGVKIRPGTVISYIVLKGSGRIGDRAIPADEFDPTKHRYDAEYYIENQVLPAVERILKAFGYRKEDLRYQKTKQVGSGAWLKVKGKKGTEAYVEQKLISEEDLNSAVDHHHHHH

SEQ ID NO: 351 - DNA, 2409 bp, Artificial Sequence
  Description of Artificial Sequence:Thermococcus species 9degreesN-7 mutant DNA polymerase, 9degreesN mutant
atgattctcgataccgactacatcaccgagaacgggaagcccgtgataagggtcttcaagaaggagaacggcgagtttaaaatcgagtacgacagaaccttcgagccctacttctacgcccttctgaaggacgattctgcgatagaggacgtcaagaaggtaaccgcaaagaggcacggaacggttgtcaaggtgaagcgcgccgagaaggtgcagaagaagttcctcggcaggccgatagaggtctggaagctctacttcaaccatcctcaggacgtcccggcgattcgagacaggatacgcgcccaccccgctgtcgttgacatctacgagtacgacatacccttcgccaagcgctacctcatcgacaagggcctgattccgatggagggcgacgaggagcttacgatgctcgccttcgcgatcgcaaccctctatcacgagggcgaggagttcggaaccgggccgattctcatgataagctacgccgacgggagcgaggcgagggtgataacctggaagaagattgaccttccgtacgttgacgtcgtctcgaccgagaaggagatgattaagcgcttcctccgcgtcgtcagggagaaggaccccgacgtgctcatcacctacaacggcgacaacttcgacttcgcctacctgaagaagcgctgtgaggaactcggaataaagttcacactcggcagggacgggagcgagccgaagatacagcgaatgggcgaccgctttgccgttgaggtgaagggcaggattcacttcgacctctaccccgtcataaggcgcacgataaacctcccgacctacacccttgaggccgtttacgaggccgtctttggaaagcccaaggagaaggtttacgcagaggagatagcgcaggcctgggagagcggggagggccttgaaagggttgcaagatactcgatggaggacgctaaggtgacctacgagctgggaagggagttcttcccgatggaggcccagctttcgaggcttataggccagagcctctgggacgtctcgcgctcgagcaccggaaatttggtggagtggttcctcctgcggaaggcctacaagaggaacgagctcgccccaaacaagcccgacgagagggagctcgcgagacggcgcgggggctacgctggcgggtacgttaaggaaccagagcggggattgtgggacaacattgtgtatttagacttccgctcgtggtatccttcaatcatcataacccacaacgtctcgccggataccctcaaccgcgagggctgtaaagagtacgacgtcgcccctgaggttggacacaagttctgcaaggacttccccggcttcataccaagcctcctgggagatttgctcgaggagaggcagaagataaagcggaagatgaaggcaacggttgacccgctggagaagaaactcctcgattacaggatgtggcttataaaaatcctcgccaacagcttctacggcatctacggctacgccaaggcccggtggtactgcaaggagtgcgccgagagcgttacggcctggggaagggagtatatagaaatggttatccgggaactcgaagaaaaattcggttttaaagttctctatgccgatacagacggtctccatgctaccattcccggagcagacgctgaaacagtcaagaaaaaagcaaaggagttcttaaaatacattaatccaaaactgcccggcctgctcgaacttgagtacgagggcttctacgtgaggggcttcttcgtcacgaagaagaagtacgctgtgatagacgaggagggcaagataaccacgaggggtcttgagattgtgaggcgcgactggagcgagatagcgaaggagacccaggccagggtcttagaggcgatactcaagcacggtgacgtcgaggaggccgttaggatagtcaaggaagtgacggaaaagctgagcaagtatgaggtcccgcccgagaagctggtaatccacgagcagataacgcgcgatttgagggattacaaagccaccggcccgcacgttgccgttgcgaagaggctcgcggcgcgtggagtgaaaatccggcccggcacggtgataagctacatcgtcctaaagggctctggaaggataggcgacagggcgattccagctgatgagttcgacccgacgaagcaccgctacgatgcggaatactacatcgagaaccaggttctcccggcggtggagaggattctaaaagccttcggctatcggaaggaggatttgcgctaccagaagacgaagcaggtcggctcgggcgcgtggctgaaggtgaaggggaagaagggtaccgaagcttacgtagaacaaaaactcatctcagaagaggatctgaatagcgccgtcgaccatcatcatcatcatcattga

SEQ ID NO: 352 - protein, 802 aa, Artificial Sequence
  Description of Artificial Sequence:Thermococcus species 9degreesN-7 mutant DNA polymerase, 9degreesN mutant
MILDTDYITENGKPVIRVFKKENGEFKIEYDRTFEPYFYALLKDDSAIEDVKKVTAKRHGTVVKVKRAEKVQKKFLGRPIEVWKLYFNHPQDVPAIRDRIRAHPAVVDIYEYDIPFAKRYLIDKGLIPMEGDEELTMLAFAIATLYHEGEEFGTGPILMISYADGSEARVITWKKIDLPYVDVVSTEKEMIKRFLRVVREKDPDVLITYNGDNFDFAYLKKRCEELGIKFTLGRDGSEPKIQRMGDRFAVEVKGRIHFDLYPVIRRTINLPTYTLEAVYEAVFGKPKEKVYAEEIAQAWESGEGLERVARYSMEDAKVTYELGREFFPMEAQLSRLIGQSLWDVSRSSTGNLVEWFLLRKAYKRNELAPNKPDERELARRRGGYAGGYVKEPERGLWDNIVYLDFRSWYPSIIITHNVSPDTLNREGCKEYDVAPEVGHKFCKDFPGFIPSLLGDLLEERQKIKRKMKATVDPLEKKLLDYRMWLIKILANSFYGIYGYAKARWYCKECAESVTAWGREYIEMVIRELEEKFGFKVLYADTDGLHATIPGADAETVKKKAKEFLKYINPKLPGLLELEYEGFYVRGFFVTKKKYAVIDEEGKITTRGLEIVRRDWSEIAKETQARVLEAILKHGDVEEAVRIVKEVTEKLSKYEVPPEKLVIHEQITRDLRDYKATGPHVAVAKRLAARGVKIRPGTVISYIVLKGSGRIGDRAIPADEFDPTKHRYDAEYYIENQVLPAVERILKAFGYRKEDLRYQKTKQVGSGAWLKVKGKKGTEAYVEQKLISEEDLNSAVDHHHHHH

SEQ ID NO: 353 - DNA, 2409 bp, Artificial Sequence
  Description of Artificial Sequence:Thermococcus species 9degreesN-7 mutant DNA polymerase, 9degreesN mutant
atgattctcgataccgactacatcaccgagaacgggaagcccgtgataagggtcttcaagaaggagaacggcgagtttaaaatcgagtacgacagaaccttcgagccctacttctacgcccttctgaaggacgattctgcgatagaggacgtcaagaaggtaaccgcaaagaggcacggaacggttgtcaaggtgaagcgcgccgagaaggtgcagaagaagttcctcggcaggccgatagaggtctggaagctctacttcaaccatcctcaggacgtcccggcgattcgagacaggatacgcgcccaccccgctgtcgttgacatctacgagtacgacatacccttcgccaagcgctacctcatcgacaagggcctgattccgatggagggcgacgaggagcttacgatgctcgccttcgcgatcgcaaccctctatcacgagggcgaggagttcggaaccgggccgattctcatgataagctacgccgacgggagcgaggcgagggtgataacctggaagaagattgaccttccgtacgttgacgtcgtctcgaccgagaaggagatgattaagcgcttcctccgcgtcgtcagggagaaggaccccgacgtgctcatcacctacaacggcgacaacttcgacttcgcctacctgaagaagcgctgtgaggaactcggaataaagttcacactcggcagggacgggagcgagccgaagatacagcgaatgggcgaccgctttgccgttgaggtgaagggcaggattcacttcgacctctaccccgtcataaggcgcacgataaacctcccgacctacacccttgaggccgtttacgaggccgtctttggaaagcccaaggagaaggtttacgcagaggagatagcgcaggcctgggagagcggggagggccttgaaagggttgcaagatactcgatggaggacgctaaggtgacctacgagctgggaagggagttcttcccgatggaggcccagctttcgaggcttataggccagagcctctgggacgtctcgcgctcgagcaccggaaatttggtggagtggttcctcctgcggaaggcctacaagaggaacgagctcgccccaaacaagcccgacgagagggagctcgcgagacggcgcgggggctacgctggcgggtacgttaaggaaccagagcggggattgtgggacaacattgtgtatttagacttccgctcgtggtatccttcaatcatcataacccacaacgtctcgccggataccctcaaccgcgagggctgtaaagagtacgacgtcgcccctgaggttggacacaagttctgcaaggacttccccggcttcataccaagcctcctgggagatttgctcgaggagaggcagaagataaagcggaagatgaaggcaacggttgacccgctggagaagaaactcctcgattacaggatgtggcttataaaaatcctcgccaacagcttctacggctacacgggctacgccaaggcccggtggtactgcaaggagtgcgccgagagcgttacggcctggggaagggagtatatagaaatggttatccgggaactcgaagaaaaattcggttttaaagttctctatgccgatacagacggtctccatgctaccattcccggagcagacgctgaaacagtcaagaaaaaagcaaaggagttcttaaaatacattaatccaaaactgcccggcctgctcgaacttgagtacgagggcttctacgtgaggggcttcttcgtcacgaagaagaagtacgctgtgatagacgaggagggcaagataaccacgaggggtcttgagattgtgaggcgcgactggagcgagatagcgaaggagacccaggccagggtcttagaggcgatactcaagcacggtgacgtcgaggaggccgttaggatagtcaaggaagtgacggaaaagctgagcaagtatgaggtcccgcccgagaagctggtaatccacgagcagataacgcgcgatttgagggattacaaagccaccggcccgcacgttgccgttgcgaagaggctcgcggcgcgtggagtgaaaatccggcccggcacggtgataagctacatcgtcctaaagggctctggaaggataggcgacagggcgattccagctgatgagttcgacccgacgaagcaccgctacgatgcggaatactacatcgagaaccaggttctcccggcggtggagaggattctaaaagccttcggctatcggaaggaggatttgcgctaccagaagacgaagcaggtcggctcgggcgcgtggctgaaggtgaaggggaagaagggtaccgaagcttacgtagaacaaaaactcatctcagaagaggatctgaatagcgccgtcgaccatcatcatcatcatcattga

SEQ ID NO: 354 - protein, 802 aa, Artificial Sequence
  Description of Artificial Sequence:Thermococcus species 9degreesN-7 mutant DNA polymerase, 9degreesN mutant
MILDTDYITENGKPVIRVFKKENGEFKIEYDRTFEPYFYALLKDDSAIEDVKKVTAKRHGTVVKVKRAEKVQKKFLGRPIEVWKLYFNHPQDVPAIRDRIRAHPAVVDIYEYDIPFAKRYLIDKGLIPMEGDEELTMLAFAIATLYHEGEEFGTGPILMISYADGSEARVITWKKIDLPYVDVVSTEKEMIKRFLRVVREKDPDVLITYNGDNFDFAYLKKRCEELGIKFTLGRDGSEPKIQRMGDRFAVEVKGRIHFDLYPVIRRTINLPTYTLEAVYEAVFGKPKEKVYAEEIAQAWESGEGLERVARYSMEDAKVTYELGREFFPMEAQLSRLIGQSLWDVSRSSTGNLVEWFLLRKAYKRNELAPNKPDERELARRRGGYAGGYVKEPERGLWDNIVYLDFRSWYPSIIITHNVSPDTLNREGCKEYDVAPEVGHKFCKDFPGFIPSLLGDLLEERQKIKRKMKATVDPLEKKLLDYRMWLIKILANSFYGYTGYAKARWYCKECAESVTAWGREYIEMVIRELEEKFGFKVLYADTDGLHATIPGADAETVKKKAKEFLKYINPKLPGLLELEYEGFYVRGFFVTKKKYAVIDEEGKITTRGLEIVRRDWSEIAKETQARVLEAILKHGDVEEAVRIVKEVTEKLSKYEVPPEKLVIHEQITRDLRDYKATGPHVAVAKRLAARGVKIRPGTVISYIVLKGSGRIGDRAIPADEFDPTKHRYDAEYYIENQVLPAVERILKAFGYRKEDLRYQKTKQVGSGAWLKVKGKKGTEAYVEQKLISEEDLNSAVDHHHHHH

SEQ ID NO: 355 - DNA, 2409 bp, Artificial Sequence
  Description of Artificial Sequence:Thermococcus species 9degreesN-7 mutant DNA polymerase, 9degreesN mutant
atgattctcgataccgactacatcaccgagaacgggaagcccgtgataagggtcttcaagaaggagaacggcgagtttaaaatcgagtacgacagaaccttcgagccctacttctacgcccttctgaaggacgattctgcgatagaggacgtcaagaaggtaaccgcaaagaggcacggaacggttgtcaaggtgaagcgcgccgagaaggtgcagaagaagttcctcggcaggccgatagaggtctggaagctctacttcaaccatcctcaggacgtcccggcgattcgagacaggatacgcgcccaccccgctgtcgttgacatctacgagtacgacatacccttcgccaagcgctacctcatcgacaagggcctgattccgatggagggcgacgaggagcttacgatgctcgccttcgcgatcgcaaccctctatcacgagggcgaggagttcggaaccgggccgattctcatgataagctacgccgacgggagcgaggcgagggtgataacctggaagaagattgaccttccgtacgttgacgtcgtctcgaccgagaaggagatgattaagcgcttcctccgcgtcgtcagggagaaggaccccgacgtgctcatcacctacaacggcgacaacttcgacttcgcctacctgaagaagcgctgtgaggaactcggaataaagttcacactcggcagggacgggagcgagccgaagatacagcgaatgggcgaccgctttgccgttgaggtgaagggcaggattcacttcgacctctaccccgtcataaggcgcacgataaacctcccgacctacacccttgaggccgtttacgaggccgtctttggaaagcccaaggagaaggtttacgcagaggagatagcgcaggcctgggagagcggggagggccttgaaagggttgcaagatactcgatggaggacgctaaggtgacctacgagctgggaagggagttcttcccgatggaggcccagctttcgaggcttataggccagagcctctgggacgtctcgcgctcgagcaccggaaatttggtggagtggttcctcctgcggaaggcctacaagaggaacgagctcgccccaaacaagcccgacgagagggagctcgcgagacggcgcgggggctacgctggcgggtacgttaaggaaccagagcggggattgtgggacaacattgtgtatttagacttccgctcgtggtatccttcaatcatcataacccacaacgtctcgccggataccctcaaccgcgagggctgtaaagagtacgacgtcgcccctgaggttggacacaagttctgcaaggacttccccggcttcataccaagcctcctgggagatttgctcgaggagaggcagaagataaagcggaagatgaaggcaacggttgacccgctggagaagaaactcctcgattacaggatgtggcttataaaaatcctcgccaacagcttctacggctaccaaggctacgccaaggcccggtggtactgcaaggagtgcgccgagagcgttacggcctggggaagggagtatatagaaatggttatccgggaactcgaagaaaaattcggttttaaagttctctatgccgatacagacggtctccatgctaccattcccggagcagacgctgaaacagtcaagaaaaaagcaaaggagttcttaaaatacattaatccaaaactgcccggcctgctcgaacttgagtacgagggcttctacgtgaggggcttcttcgtcacgaagaagaagtacgctgtgatagacgaggagggcaagataaccacgaggggtcttgagattgtgaggcgcgactggagcgagatagcgaaggagacccaggccagggtcttagaggcgatactcaagcacggtgacgtcgaggaggccgttaggatagtcaaggaagtgacggaaaagctgagcaagtatgaggtcccgcccgagaagctggtaatccacgagcagataacgcgcgatttgagggattacaaagccaccggcccgcacgttgccgttgcgaagaggctcgcggcgcgtggagtgaaaatccggcccggcacggtgataagctacatcgtcctaaagggctctggaaggataggcgacagggcgattccagctgatgagttcgacccgacgaagcaccgctacgatgcggaatactacatcgagaaccaggttctcccggcggtggagaggattctaaaagccttcggctatcggaaggaggatttgcgctaccagaagacgaagcaggtcggctcgggcgcgtggctgaaggtgaaggggaagaagggtaccgaagcttacgtagaacaaaaactcatctcagaagaggatctgaatagcgccgtcgaccatcatcatcatcatcattga

SEQ ID NO: 356 - protein, 802 aa, Artificial Sequence
  Description of Artificial Sequence:Thermococcus species 9degreesN-7 mutant DNA polymerase, 9degreesN mutant
MILDTDYITENGKPVIRVFKKENGEFKIEYDRTFEPYFYALLKDDSAIEDVKKVTAKRHGTVVKVKRAEKVQKKFLGRPIEVWKLYFNHPQDVPAIRDRIRAHPAVVDIYEYDIPFAKRYLIDKGLIPMEGDEELTMLAFAIATLYHEGEEFGTGPILMISYADGSEARVITWKKIDLPYVDVVSTEKEMIKRFLRVVREKDPDVLITYNGDNFDFAYLKKRCEELGIKFTLGRDGSEPKIQRMGDRFAVEVKGRIHFDLYPVIRRTINLPTYTLEAVYEAVFGKPKEKVYAEEIAQAWESGEGLERVARYSMEDAKVTYELGREFFPMEAQLSRLIGQSLWDVSRSSTGNLVEWFLLRKAYKRNELAPNKPDERELARRRGGYAGGYVKEPERGLWDNIVYLDFRSWYPSIIITHNVSPDTLNREGCKEYDVAPEVGHKFCKDFPGFIPSLLGDLLEERQKIKRKMKATVDPLEKKLLDYRMWLIKILANSFYGYQGYAKARWYCKECAESVTAWGREYIEMVIRELEEKFGFKVLYADTDGLHATIPGADAETVKKKAKEFLKYINPKLPGLLELEYEGFYVRGFFVTKKKYAVIDEEGKITTRGLEIVRRDWSEIAKETQARVLEAILKHGDVEEAVRIVKEVTEKLSKYEVPPEKLVIHEQITRDLRDYKATGPHVAVAKRLAARGVKIRPGTVISYIVLKGSGRIGDRAIPADEFDPTKHRYDAEYYIENQVLPAVERILKAFGYRKEDLRYQKTKQVGSGAWLKVKGKKGTEAYVEQKLISEEDLNSAVDHHHHHH

SEQ ID NO: 357 - DNA, 2409 bp, Artificial Sequence
  Description of Artificial Sequence:Thermococcus species 9degreesN-7 mutant DNA polymerase, 9degreesN mutant
atgattctcgataccgactacatcaccgagaacgggaagcccgtgataagggtcttcaagaaggagaacggcgagtttaaaatcgagtacgacagaaccttcgagccctacttctacgcccttctgaaggacgattctgcgatagaggacgtcaagaaggtaaccgcaaagaggcacggaacggttgtcaaggtgaagcgcgccgagaaggtgcagaagaagttcctcggcaggccgatagaggtctggaagctctacttcaaccatcctcaggacgtcccggcgattcgagacaggatacgcgcccaccccgctgtcgttgacatctacgagtacgacatacccttcgccaagcgctacctcatcgacaagggcctgattccgatggagggcgacgaggagcttacgatgctcgccttcgcgatcgcaaccctctatcacgagggcgaggagttcggaaccgggccgattctcatgataagctacgccgacgggagcgaggcgagggtgataacctggaagaagattgaccttccgtacgttgacgtcgtctcgaccgagaaggagatgattaagcgcttcctccgcgtcgtcagggagaaggaccccgacgtgctcatcacctacaacggcgacaacttcgacttcgcctacctgaagaagcgctgtgaggaactcggaataaagttcacactcggcagggacgggagcgagccgaagatacagcgaatgggcgaccgctttgccgttgaggtgaagggcaggattcacttcgacctctaccccgtcataaggcgcacgataaacctcccgacctacacccttgaggccgtttacgaggccgtctttggaaagcccaaggagaaggtttacgcagaggagatagcgcaggcctgggagagcggggagggccttgaaagggttgcaagatactcgatggaggacgctaaggtgacctacgagctgggaagggagttcttcccgatggaggcccagctttcgaggcttataggccagagcctctgggacgtctcgcgctcgagcaccggaaatttggtggaggcattcctcctgcggaaggcctacaagaggaacgagctcgccccaaacaagcccgacgagagggagctcgcgagacggcgcgggggctacgctggcgggtacgttaaggaaccagagcggggattgtgggacaacattgtgtatttagacttccgctcgctgtatccttcaatcatcataacccacaacgtctcgccggataccctcaaccgcgagggctgtaaagagtacgacgtcgcccctgaggttggacacaagttctgcaaggacttccccggcttcataccaagcctcctgggagatttgctcgaggagaggcagaagatagagcggaagatgaaggcaacggttgacccgctggagaagaaactcctcgtgtacaggcagtggcttataaaaatcctcactaacagcttctacggctactacggctacgccaaggcccggtggtactgcaaggagtgcgccgagagcgttacggcctggggaagggagtatatagaaatggttatccgggaactcgaagaaaaattcggttttaaagttctctatgccgatacagacggtctccatgctaccattcccggagcagacgctgaaacagtcaagaaaaaagcaaaggagttcttaaaatacattaatccaaaactgcccggcctgctcgaacttgagtacgagggcttctacgtgaggggcttcttcgtcacgaagaagaagtacgctgtgatagacgaggagggcaagataaccacgaggggtcttgagattgtgaggcgcgactggagcgagatagcgaaggagacccaggccagggtcttagaggcgatactcaagcacggtgacgtcgaggaggccgttaggatagtcaaggaagtgacggaaaagctgagcaagtatgaggtcccgcccgagaagctggtaatccacgagcagataacgcgcgatttgagggattacaaagccaccggcccgcacgttgccgttgcgaagaggctcgcggcgcgtggagtgaaaatccggcccggcacggtgataagctacatcgtcctaaagggctctggaaggataggcgacagggcgattccagctgatgagttcgacccgacgaagcaccgctacgatgcggaatactacatcgagaaccaggttctcccggcggtggagaggattctaaaagccttcggctatcggaaggaggatttgcgctaccagaagacgaagcaggtcggctcgggcgcgtggctgaaggtgaaggggaagaagggtaccgaagcttacgtagaacaaaaactcatctcagaagaggatctgaatagcgccgtcgaccatcatcatcatcatcattga

SEQ ID NO: 358 - protein, 802 aa, Artificial Sequence
  Description of Artificial Sequence:Thermococcus species 9degreesN-7 mutant DNA polymerase, 9degreesN mutant
MILDTDYITENGKPVIRVFKKENGEFKIEYDRTFEPYFYALLKDDSAIEDVKKVTAKRHGTVVKVKRAEKVQKKFLGRPIEVWKLYFNHPQDVPAIRDRIRAHPAVVDIYEYDIPFAKRYLIDKGLIPMEGDEELTMLAFAIATLYHEGEEFGTGPILMISYADGSEARVITWKKIDLPYVDVVSTEKEMIKRFLRVVREKDPDVLITYNGDNFDFAYLKKRCEELGIKFTLGRDGSEPKIQRMGDRFAVEVKGRIHFDLYPVIRRTINLPTYTLEAVYEAVFGKPKEKVYAEEIAQAWESGEGLERVARYSMEDAKVTYELGREFFPMEAQLSRLIGQSLWDVSRSSTGNLVEAFLLRKAYKRNELAPNKPDERELARRRGGYAGGYVKEPERGLWDNIVYLDFRSLYPSIIITHNVSPDTLNREGCKEYDVAPEVGHKFCKDFPGFIPSLLGDLLEERQKIERKMKATVDPLEKKLLVYRQWLIKILTNSFYGYYGYAKARWYCKECAESVTAWGREYIEMVIRELEEKFGFKVLYADTDGLHATIPGADAETVKKKAKEFLKYINPKLPGLLELEYEGFYVRGFFVTKKKYAVIDEEGKITTRGLEIVRRDWSEIAKETQARVLEAILKHGDVEEAVRIVKEVTEKLSKYEVPPEKLVIHEQITRDLRDYKATGPHVAVAKRLAARGVKIRPGTVISYIVLKGSGRIGDRAIPADEFDPTKHRYDAEYYIENQVLPAVERILKAFGYRKEDLRYQKTKQVGSGAWLKVKGKKGTEAYVEQKLISEEDLNSAVDHHHHHH

SEQ ID NO: 359 - DNA, 2409 bp, Artificial Sequence
  Description of Artificial Sequence:Thermococcus species 9degreesN-7 mutant DNA polymerase, 9degreesN mutant
atgattctcgataccgactacatcaccgagaacgggaagcccgtgataagggtcttcaagaaggagaacggcgagtttaaaatcgagtacgacagaaccttcgagccctacttctacgcccttctgaaggacgattctgcgatagaggacgtcaagaaggtaaccgcaaagaggcacggaacggttgtcaaggtgaagcgcgccgagaaggtgcagaagaagttcctcggcaggccgatagaggtctggaagctctacttcaaccatcctcaggacgtcccggcgattcgagacaggatacgcgcccaccccgctgtcgttgacatctacgagtacgacatacccttcgccaagcgctacctcatcgacaagggcctgattccgatggagggcgacgaggagcttacgatgctcgccttcgcgatcgcaaccctctatcacgagggcgaggagttcggaaccgggccgattctcatgataagctacgccgacgggagcgaggcgagggtgataacctggaagaagattgaccttccgtacgttgacgtcgtctcgaccgagaaggagatgattaagcgcttcctccgcgtcgtcagggagaaggaccccgacgtgctcatcacctacaacggcgacaacttcgacttcgcctacctgaagaagcgctgtgaggaactcggaataaagttcacactcggcagggacgggagcgagccgaagatacagcgaatgggcgaccgctttgccgttgaggtgaagggcaggattcacttcgacctctaccccgtcataaggcgcacgataaacctcccgacctacacccttgaggccgtttacgaggccgtctttggaaagcccaaggagaaggtttacgcagaggagatagcgcaggcctgggagagcggggagggccttgaaagggttgcaagatactcgatggaggacgctaaggtgacctacgagctgggaagggagttcttcccgatggaggcccagctttcgaggcttataggccagagcctctgggacgtctcgcgctcgagcaccggaaatttggtggctgcattcctcctgcggaaggcctacaagaggaacgagctcgccccaaacaagcccgacgagagggagctcgcgagacggcgcgggggctacgctggcgggtacgttaaggaaccagagcggggattgtgggacaacattgtgtatttagacttccgctcgctgtatccttcaatcatcataacccacaacgtctcgccggataccctcaaccgcgagggctgtaaagagtacgacgtcgcccctgaggttggacacaagttctgcaaggacttccccggcttcataccaagcctcctgggagatttgctcgaggagaggcagaagatagagcggaagatgaaggcaacggttgacccgctggagaagaaactcctcgtgtacaggcagtggcttataaaaatcctcgccaacagcttctacggctactacggctacgccaaggcccggtggtactgcaaggagtgcgccgagagcgttacggcctggggaagggagtatatagaaatggttatccgggaactcgaagaaaaattcggttttaaagttctctatgccgatacagacggtctccatgctaccattcccggagcagacgctgaaacagtcaagaaaaaagcaaaggagttcttaaaatacattaatccaaaactgcccggcctgctcgaacttgagtacgagggcttctacgtgaggggcttcttcgtcacgaagaagaagtacgctgtgatagacgaggagggcaagataaccacgaggggtcttgagattgtgaggcgcgactggagcgagatagcgaaggagacccaggccagggtcttagaggcgatactcaagcacggtgacgtcgaggaggccgttaggatagtcaaggaagtgacggaaaagctgagcaagtatgaggtcccgcccgagaagctggtaatccacgagcagataacgcgcgatttgagggattacaaagccaccggcccgcacgttgccgttgcgaagaggctcgcggcgcgtggagtgaaaatccggcccggcacggtgataagctacatcgtcctaaagggctctggaaggataggcgacagggcgattccagctgatgagttcgacccgacgaagcaccgctacgatgcggaatactacatcgagaaccaggttctcccggcggtggagaggattctaaaagccttcggctatcggaaggaggatttgcgctaccagaagacgaagcaggtcggctcgggcgcgtggctgaaggtgaaggggaagaagggtaccgaagcttacgtagaacaaaaactcatctcagaagaggatctgaatagcgccgtcgaccatcatcatcatcatcattga

SEQ ID NO: 360 - protein, 802 aa, Artificial Sequence
  Description of Artificial Sequence:Thermococcus species 9degreesN-7 mutant DNA polymerase, 9degreesN mutant
MILDTDYITENGKPVIRVFKKENGEFKIEYDRTFEPYFYALLKDDSAIEDVKKVTAKRHGTVVKVKRAEKVQKKFLGRPIEVWKLYFNHPQDVPAIRDRIRAHPAVVDIYEYDIPFAKRYLIDKGLIPMEGDEELTMLAFAIATLYHEGEEFGTGPILMISYADGSEARVITWKKIDLPYVDVVSTEKEMIKRFLRVVREKDPDVLITYNGDNFDFAYLKKRCEELGIKFTLGRDGSEPKIQRMGDRFAVEVKGRIHFDLYPVIRRTINLPTYTLEAVYEAVFGKPKEKVYAEEIAQAWESGEGLERVARYSMEDAKVTYELGREFFPMEAQLSRLIGQSLWDVSRSSTGNLVAAFLLRKAYKRNELAPNKPDERELARRRGGYAGGYVKEPERGLWDNIVYLDFRSLYPSIIITHNVSPDTLNREGCKEYDVAPEVGHKFCKDFPGFIPSLLGDLLEERQKIERKMKATVDPLEKKLLVYRQWLIKILANSFYGYYGYAKARWYCKECAESVTAWGREYIEMVIRELEEKFGFKVLYADTDGLHATIPGADAETVKKKAKEFLKYINPKLPGLLELEYEGFYVRGFFVTKKKYAVIDEEGKITTRGLEIVRRDWSEIAKETQARVLEAILKHGDVEEAVRIVKEVTEKLSKYEVPPEKLVIHEQITRDLRDYKATGPHVAVAKRLAARGVKIRPGTVISYIVLKGSGRIGDRAIPADEFDPTKHRYDAEYYIENQVLPAVERILKAFGYRKEDLRYQKTKQVGSGAWLKVKGKKGTEAYVEQKLISEEDLNSAVDHHHHHH

SEQ ID NO: 361 - DNA, 2409 bp, Artificial Sequence
  Description of Artificial Sequence:Thermococcus species 9degreesN-7 mutant DNA polymerase, 9degreesN mutant
atgattctcgataccgactacatcaccgagaacgggaagcccgtgataagggtcttcaagaaggagaacggcgagtttaaaatcgagtacgacagaaccttcgagccctacttctacgcccttctgaaggacgattctgcgatagaggacgtcaagaaggtaaccgcaaagaggcacggaacggttgtcaaggtgaagcgcgccgagaaggtgcagaagaagttcctcggcaggccgatagaggtctggaagctctacttcaaccatcctcaggacgtcccggcgattcgagacaggatacgcgcccaccccgctgtcgttgacatctacgagtacgacatacccttcgccaagcgctacctcatcgacaagggcctgattccgatggagggcgacgaggagcttacgatgctcgccttcgcgatcgcaaccctctatcacgagggcgaggagttcggaaccgggccgattctcatgataagctacgccgacgggagcgaggcgagggtgataacctggaagaagattgaccttccgtacgttgacgtcgtctcgaccgagaaggagatgattaagcgcttcctccgcgtcgtcagggagaaggaccccgacgtgctcatcacctacaacggcgacaacttcgacttcgcctacctgaagaagcgctgtgaggaactcggaataaagttcacactcggcagggacgggagcgagccgaagatacagcgaatgggcgaccgctttgccgttgaggtgaagggcaggattcacttcgacctctaccccgtcataaggcgcacgataaacctcccgacctacacccttgaggccgtttacgaggccgtctttggaaagcccaaggagaaggtttacgcagaggagatagcgcaggcctgggagagcggggagggccttgaaagggttgcaagatactcgatggaggacgctaaggtgacctacgagctgggaagggagttcttcccgatggaggcccagctttcgaggcttataggccagagcctctgggacgtctcgcgctcgagcaccggaaatttggtgccggcattcctcctgcggaaggcctacaagaggaacgagctcgccccaaacaagcccgacgagagggagctcgcgagacggcgcgggggctacgctggcgggtacgttaaggaaccagagcggggattgtgggacaacattgtgtatttagacttccgctcgctgtatccttcaatcatcataacccacaacgtctcgccggataccctcaaccgcgagggctgtaaagagtacgacgtcgcccctgaggttggacacaagttctgcaaggacttccccggcttcataccaagcctcctgggagatttgctcgaggagaggcagaagatagagcggaagatgaaggcaacggttgacccgctggagaagaaactcctcgtgtacaggcagtggcttataaaaatcctcgccaacagcttctacggctactacggctacgccaaggcccggtggtactgcaaggagtgcgccgagagcgttacggcctggggaagggagtatatagaaatggttatccgggaactcgaagaaaaattcggttttaaagttctctatgccgatacagacggtctccatgctaccattcccggagcagacgctgaaacagtcaagaaaaaagcaaaggagttcttaaaatacattaatccaaaactgcccggcctgctcgaacttgagtacgagggcttctacgtgaggggcttcttcgtcacgaagaagaagtacgctgtgatagacgaggagggcaagataaccacgaggggtcttgagattgtgaggcgcgactggagcgagatagcgaaggagacccaggccagggtcttagaggcgatactcaagcacggtgacgtcgaggaggccgttaggatagtcaaggaagtgacggaaaagctgagcaagtatgaggtcccgcccgagaagctggtaatccacgagcagataacgcgcgatttgagggattacaaagccaccggcccgcacgttgccgttgcgaagaggctcgcggcgcgtggagtgaaaatccggcccggcacggtgataagctacatcgtcctaaagggctctggaaggataggcgacagggcgattccagctgatgagttcgacccgacgaagcaccgctacgatgcggaatactacatcgagaaccaggttctcccggcggtggagaggattctaaaagccttcggctatcggaaggaggatttgcgctaccagaagacgaagcaggtcggctcgggcgcgtggctgaaggtgaaggggaagaagggtaccgaagcttacgtagaacaaaaactcatctcagaagaggatctgaatagcgccgtcgaccatcatcatcatcatcattga

SEQ ID NO: 362 - protein, 802 aa, Artificial Sequence
  Description of Artificial Sequence:Thermococcus species 9degreesN-7 mutant DNA polymerase, 9degreesN mutant
MILDTDYITENGKPVIRVFKKENGEFKIEYDRTFEPYFYALLKDDSAIEDVKKVTAKRHGTVVKVKRAEKVQKKFLGRPIEVWKLYFNHPQDVPAIRDRIRAHPAVVDIYEYDIPFAKRYLIDKGLIPMEGDEELTMLAFAIATLYHEGEEFGTGPILMISYADGSEARVITWKKIDLPYVDVVSTEKEMIKRFLRVVREKDPDVLITYNGDNFDFAYLKKRCEELGIKFTLGRDGSEPKIQRMGDRFAVEVKGRIHFDLYPVIRRTINLPTYTLEAVYEAVFGKPKEKVYAEEIAQAWESGEGLERVARYSMEDAKVTYELGREFFPMEAQLSRLIGQSLWDVSRSSTGNLVPAFLLRKAYKRNELAPNKPDERELARRRGGYAGGYVKEPERGLWDNIVYLDFRSLYPSIIITHNVSPDTLNREGCKEYDVAPEVGHKFCKDFPGFIPSLLGDLLEERQKIERKMKATVDPLEKKLLVYRQWLIKILANSFYGYYGYAKARWYCKECAESVTAWGREYIEMVIRELEEKFGFKVLYADTDGLHATIPGADAETVKKKAKEFLKYINPKLPGLLELEYEGFYVRGFFVTKKKYAVIDEEGKITTRGLEIVRRDWSEIAKETQARVLEAILKHGDVEEAVRIVKEVTEKLSKYEVPPEKLVIHEQITRDLRDYKATGPHVAVAKRLAARGVKIRPGTVISYIVLKGSGRIGDRAIPADEFDPTKHRYDAEYYIENQVLPAVERILKAFGYRKEDLRYQKTKQVGSGAWLKVKGKKGTEAYVEQKLISEEDLNSAVDHHHHHH

SEQ ID NO: 363 - DNA, 2409 bp, Artificial Sequence
  Description of Artificial Sequence:Thermococcus species 9degreesN-7 mutant DNA polymerase, 9degreesN mutant
atgattctcgataccgactacatcaccgagaacgggaagcccgtgataagggtcttcaagaaggagaacggcgagtttaaaatcgagtacgacagaaccttcgagccctacttctacgcccttctgaaggacgattctgcgatagaggacgtcaagaaggtaaccgcaaagaggcacggaacggttgtcaaggtgaagcgcgccgagaaggtgcagaagaagttcctcggcaggccgatagaggtctggaagctctacttcaaccatcctcaggacgtcccggcgattcgagacaggatacgcgcccaccccgctgtcgttgacatctacgagtacgacatacccttcgccaagcgctacctcatcgacaagggcctgattccgatggagggcgacgaggagcttacgatgctcgccttcgcgatcgcaaccctctatcacgagggcgaggagttcggaaccgggccgattctcatgataagctacgccgacgggagcgaggcgagggtgataacctggaagaagattgaccttccgtacgttgacgtcgtctcgaccgagaaggagatgattaagcgcttcctccgcgtcgtcagggagaaggaccccgacgtgctcatcacctacaacggcgacaacttcgacttcgcctacctgaagaagcgctgtgaggaactcggaataaagttcacactcggcagggacgggagcgagccgaagatacagcgaatgggcgaccgctttgccgttgaggtgaagggcaggattcacttcgacctctaccccgtcataaggcgcacgataaacctcccgacctacacccttgaggccgtttacgaggccgtctttggaaagcccaaggagaaggtttacgcagaggagatagcgcaggcctgggagagcggggagggccttgaaagggttgcaagatactcgatggaggacgctaaggtgacctacgagctgggaagggagttcttcccgatggaggcccagctttcgaggcttataggccagagcctctgggacgtctcgcgctcgagcaccggaaatttggtggaggcaaaactcctgcggaaggcctacaagaggaacgagctcgccccaaacaagcccgacgagagggagctcgcgagacggcgcgggggctacgctggcgggtacgttaaggaaccagagcggggattgtgggacaacattgtgtatttagacttccgctcgctgtatccttcaatcatcataacccacaacgtctcgccggataccctcaaccgcgagggctgtaaagagtacgacgtcgcccctgaggttggacacaagttctgcaaggacttccccggcttcataccaagcctcctgggagatttgctcgaggagaggcagaagatagagcggaagatgaaggcaacggttgacccgctggagaagaaactcctcgtgtacaggcagtggcttataaaaatcctcgccaacagcttctacggctactacggctacgccaaggcccggtggtactgcaaggagtgcgccgagagcgttacggcctggggaagggagtatatagaaatggttatccgggaactcgaagaaaaattcggttttaaagttctctatgccgatacagacggtctccatgctaccattcccggagcagacgctgaaacagtcaagaaaaaagcaaaggagttcttaaaatacattaatccaaaactgcccggcctgctcgaacttgagtacgagggcttctacgtgaggggcttcttcgtcacgaagaagaagtacgctgtgatagacgaggagggcaagataaccacgaggggtcttgagattgtgaggcgcgactggagcgagatagcgaaggagacccaggccagggtcttagaggcgatactcaagcacggtgacgtcgaggaggccgttaggatagtcaaggaagtgacggaaaagctgagcaagtatgaggtcccgcccgagaagctggtaatccacgagcagataacgcgcgatttgagggattacaaagccaccggcccgcacgttgccgttgcgaagaggctcgcggcgcgtggagtgaaaatccggcccggcacggtgataagctacatcgtcctaaagggctctggaaggataggcgacagggcgattccagctgatgagttcgacccgacgaagcaccgctacgatgcggaatactacatcgagaaccaggttctcccggcggtggagaggattctaaaagccttcggctatcggaaggaggatttgcgctaccagaagacgaagcaggtcggctcgggcgcgtggctgaaggtgaaggggaagaagggtaccgaagcttacgtagaacaaaaactcatctcagaagaggatctgaatagcgccgtcgaccatcatcatcatcatcattga

SEQ ID NO: 364 - protein, 802 aa, Artificial Sequence
  Description of Artificial Sequence:Thermococcus species 9degreesN-7 mutant DNA polymerase, 9degreesN mutant
MILDTDYITENGKPVIRVFKKENGEFKIEYDRTFEPYFYALLKDDSAIEDVKKVTAKRHGTVVKVKRAEKVQKKFLGRPIEVWKLYFNHPQDVPAIRDRIRAHPAVVDIYEYDIPFAKRYLIDKGLIPMEGDEELTMLAFAIATLYHEGEEFGTGPILMISYADGSEARVITWKKIDLPYVDVVSTEKEMIKRFLRVVREKDPDVLITYNGDNFDFAYLKKRCEELGIKFTLGRDGSEPKIQRMGDRFAVEVKGRIHFDLYPVIRRTINLPTYTLEAVYEAVFGKPKEKVYAEEIAQAWESGEGLERVARYSMEDAKVTYELGREFFPMEAQLSRLIGQSLWDVSRSSTGNLVEAKLLRKAYKRNELAPNKPDERELARRRGGYAGGYVKEPERGLWDNIVYLDFRSLYPSIIITHNVSPDTLNREGCKEYDVAPEVGHKFCKDFPGFIPSLLGDLLEERQKIERKMKATVDPLEKKLLVYRQWLIKILANSFYGYYGYAKARWYCKECAESVTAWGREYIEMVIRELEEKFGFKVLYADTDGLHATIPGADAETVKKKAKEFLKYINPKLPGLLELEYEGFYVRGFFVTKKKYAVIDEEGKITTRGLEIVRRDWSEIAKETQARVLEAILKHGDVEEAVRIVKEVTEKLSKYEVPPEKLVIHEQITRDLRDYKATGPHVAVAKRLAARGVKIRPGTVISYIVLKGSGRIGDRAIPADEFDPTKHRYDAEYYIENQVLPAVERILKAFGYRKEDLRYQKTKQVGSGAWLKVKGKKGTEAYVEQKLISEEDLNSAVDHHHHHH

SEQ ID NO: 365 - DNA, 2409 bp, Artificial Sequence
  Description of Artificial Sequence:Thermococcus species 9degreesN-7 mutant DNA polymerase, 9degreesN mutant
atgattctcgataccgactacatcaccgagaacgggaagcccgtgataagggtcttcaagaaggagaacggcgagtttaaaatcgagtacgacagaaccttcgagccctacttctacgcccttctgaaggacgattctgcgatagaggacgtcaagaaggtaaccgcaaagaggcacggaacggttgtcaaggtgaagcgcgccgagaaggtgcagaagaagttcctcggcaggccgatagaggtctggaagctctacttcaaccatcctcaggacgtcccggcgattcgagacaggatacgcgcccaccccgctgtcgttgacatctacgagtacgacatacccttcgccaagcgctacctcatcgacaagggcctgattccgatggagggcgacgaggagcttacgatgctcgccttcgcgatcgcaaccctctatcacgagggcgaggagttcggaaccgggccgattctcatgataagctacgccgacgggagcgaggcgagggtgataacctggaagaagattgaccttccgtacgttgacgtcgtctcgaccgagaaggagatgattaagcgcttcctccgcgtcgtcagggagaaggaccccgacgtgctcatcacctacaacggcgacaacttcgacttcgcctacctgaagaagcgctgtgaggaactcggaataaagttcacactcggcagggacgggagcgagccgaagatacagcgaatgggcgaccgctttgccgttgaggtgaagggcaggattcacttcgacctctaccccgtcataaggcgcacgataaacctcccgacctacacccttgaggccgtttacgaggccgtctttggaaagcccaaggagaaggtttacgcagaggagatagcgcaggcctgggagagcggggagggccttgaaagggttgcaagatactcgatggaggacgctaaggtgacctacgagctgggaagggagttcttcccgatggaggcccagctttcgaggcttataggccagagcctctgggacgtctcgcgctcgagcaccggaaatttggtggaggcatcgctcctgcggaaggcctacaagaggaacgagctcgccccaaacaagcccgacgagagggagctcgcgagacggcgcgggggctacgctggcgggtacgttaaggaaccagagcggggattgtgggacaacattgtgtatttagacttccgctcgctgtatccttcaatcatcataacccacaacgtctcgccggataccctcaaccgcgagggctgtaaagagtacgacgtcgcccctgaggttggacacaagttctgcaaggacttccccggcttcataccaagcctcctgggagatttgctcgaggagaggcagaagatagagcggaagatgaaggcaacggttgacccgctggagaagaaactcctcgtgtacaggcagtggcttataaaaatcctcgccaacagcttctacggctactacggctacgccaaggcccggtggtactgcaaggagtgcgccgagagcgttacggcctggggaagggagtatatagaaatggttatccgggaactcgaagaaaaattcggttttaaagttctctatgccgatacagacggtctccatgctaccattcccggagcagacgctgaaacagtcaagaaaaaagcaaaggagttcttaaaatacattaatccaaaactgcccggcctgctcgaacttgagtacgagggcttctacgtgaggggcttcttcgtcacgaagaagaagtacgctgtgatagacgaggagggcaagataaccacgaggggtcttgagattgtgaggcgcgactggagcgagatagcgaaggagacccaggccagggtcttagaggcgatactcaagcacggtgacgtcgaggaggccgttaggatagtcaaggaagtgacggaaaagctgagcaagtatgaggtcccgcccgagaagctggtaatccacgagcagataacgcgcgatttgagggattacaaagccaccggcccgcacgttgccgttgcgaagaggctcgcggcgcgtggagtgaaaatccggcccggcacggtgataagctacatcgtcctaaagggctctggaaggataggcgacagggcgattccagctgatgagttcgacccgacgaagcaccgctacgatgcggaatactacatcgagaaccaggttctcccggcggtggagaggattctaaaagccttcggctatcggaaggaggatttgcgctaccagaagacgaagcaggtcggctcgggcgcgtggctgaaggtgaaggggaagaagggtaccgaagcttacgtagaacaaaaactcatctcagaagaggatctgaatagcgccgtcgaccatcatcatcatcatcattga

SEQ ID NO: 366 - protein, 802 aa, Artificial Sequence
  Description of Artificial Sequence:Thermococcus species 9degreesN-7 mutant DNA polymerase, 9degreesN mutant
MILDTDYITENGKPVIRVFKKENGEFKIEYDRTFEPYFYALLKDDSAIEDVKKVTAKRHGTVVKVKRAEKVQKKFLGRPIEVWKLYFNHPQDVPAIRDRIRAHPAVVDIYEYDIPFAKRYLIDKGLIPMEGDEELTMLAFAIATLYHEGEEFGTGPILMISYADGSEARVITWKKIDLPYVDVVSTEKEMIKRFLRVVREKDPDVLITYNGDNFDFAYLKKRCEELGIKFTLGRDGSEPKIQRMGDRFAVEVKGRIHFDLYPVIRRTINLPTYTLEAVYEAVFGKPKEKVYAEEIAQAWESGEGLERVARYSMEDAKVTYELGREFFPMEAQLSRLIGQSLWDVSRSSTGNLVEASLLRKAYKRNELAPNKPDERELARRRGGYAGGYVKEPERGLWDNIVYLDFRSLYPSIIITHNVSPDTLNREGCKEYDVAPEVGHKFCKDFPGFIPSLLGDLLEERQKIERKMKATVDPLEKKLLVYRQWLIKILANSFYGYYGYAKARWYCKECAESVTAWGREYIEMVIRELEEKFGFKVLYADTDGLHATIPGADAETVKKKAKEFLKYINPKLPGLLELEYEGFYVRGFFVTKKKYAVIDEEGKITTRGLEIVRRDWSEIAKETQARVLEAILKHGDVEEAVRIVKEVTEKLSKYEVPPEKLVIHEQITRDLRDYKATGPHVAVAKRLAARGVKIRPGTVISYIVLKGSGRIGDRAIPADEFDPTKHRYDAEYYIENQVLPAVERILKAFGYRKEDLRYQKTKQVGSGAWLKVKGKKGTEAYVEQKLISEEDLNSAVDHHHHHH

SEQ ID NO: 367 - DNA, 2409 bp, Artificial Sequence
  Description of Artificial Sequence:Thermococcus species 9degreesN-7 mutant DNA polymerase, 9degreesN mutant
atgattctcgataccgactacatcaccgagaacgggaagcccgtgataagggtcttcaagaaggagaacggcgagtttaaaatcgagtacgacagaaccttcgagccctacttctacgcccttctgaaggacgattctgcgatagaggacgtcaagaaggtaaccgcaaagaggcacggaacggttgtcaaggtgaagcgcgccgagaaggtgcagaagaagttcctcggcaggccgatagaggtctggaagctctacttcaaccatcctcaggacgtcccggcgattcgagacaggatacgcgcccaccccgctgtcgttgacatctacgagtacgacatacccttcgccaagcgctacctcatcgacaagggcctgattccgatggagggcgacgaggagcttacgatgctcgccttcgcgatcgcaaccctctatcacgagggcgaggagttcggaaccgggccgattctcatgataagctacgccgacgggagcgaggcgagggtgataacctggaagaagattgaccttccgtacgttgacgtcgtctcgaccgagaaggagatgattaagcgcttcctccgcgtcgtcagggagaaggaccccgacgtgctcatcacctacaacggcgacaacttcgacttcgcctacctgaagaagcgctgtgaggaactcggaataaagttcacactcggcagggacgggagcgagccgaagatacagcgaatgggcgaccgctttgccgttgaggtgaagggcaggattcacttcgacctctaccccgtcataaggcgcacgataaacctcccgacctacacccttgaggccgtttacgaggccgtctttggaaagcccaaggagaaggtttacgcagaggagatagcgcaggcctgggagagcggggagggccttgaaagggttgcaagatactcgatggaggacgctaaggtgacctacgagctgggaagggagttcttcccgatggaggcccagctttcgaggcttataggccagagcctctgggacgtctcgcgctcgagcaccggaaatttggtggaggcagaactcctgcggaaggcctacaagaggaacgagctcgccccaaacaagcccgacgagagggagctcgcgagacggcgcgggggctacgctggcgggtacgttaaggaaccagagcggggattgtgggacaacattgtgtatttagacttccgctcgctgtatccttcaatcatcataacccacaacgtctcgccggataccctcaaccgcgagggctgtaaagagtacgacgtcgcccctgaggttggacacaagttctgcaaggacttccccggcttcataccaagcctcctgggagatttgctcgaggagaggcagaagatagagcggaagatgaaggcaacggttgacccgctggagaagaaactcctcgtgtacaggcagtggcttataaaaatcctcgccaacagcttctacggctactacggctacgccaaggcccggtggtactgcaaggagtgcgccgagagcgttacggcctggggaagggagtatatagaaatggttatccgggaactcgaagaaaaattcggttttaaagttctctatgccgatacagacggtctccatgctaccattcccggagcagacgctgaaacagtcaagaaaaaagcaaaggagttcttaaaatacattaatccaaaactgcccggcctgctcgaacttgagtacgagggcttctacgtgaggggcttcttcgtcacgaagaagaagtacgctgtgatagacgaggagggcaagataaccacgaggggtcttgagattgtgaggcgcgactggagcgagatagcgaaggagacccaggccagggtcttagaggcgatactcaagcacggtgacgtcgaggaggccgttaggatagtcaaggaagtgacggaaaagctgagcaagtatgaggtcccgcccgagaagctggtaatccacgagcagataacgcgcgatttgagggattacaaagccaccggcccgcacgttgccgttgcgaagaggctcgcggcgcgtggagtgaaaatccggcccggcacggtgataagctacatcgtcctaaagggctctggaaggataggcgacagggcgattccagctgatgagttcgacccgacgaagcaccgctacgatgcggaatactacatcgagaaccaggttctcccggcggtggagaggattctaaaagccttcggctatcggaaggaggatttgcgctaccagaagacgaagcaggtcggctcgggcgcgtggctgaaggtgaaggggaagaagggtaccgaagcttacgtagaacaaaaactcatctcagaagaggatctgaatagcgccgtcgaccatcatcatcatcatcattga

SEQ ID NO: 368 - protein, 802 aa, Artificial Sequence
  Description of Artificial Sequence:Thermococcus species 9degreesN-7 mutant DNA polymerase, 9degreesN mutant
MILDTDYITENGKPVIRVFKKENGEFKIEYDRTFEPYFYALLKDDSAIEDVKKVTAKRHGTVVKVKRAEKVQKKFLGRPIEVWKLYFNHPQDVPAIRDRIRAHPAVVDIYEYDIPFAKRYLIDKGLIPMEGDEELTMLAFAIATLYHEGEEFGTGPILMISYADGSEARVITWKKIDLPYVDVVSTEKEMIKRFLRVVREKDPDVLITYNGDNFDFAYLKKRCEELGIKFTLGRDGSEPKIQRMGDRFAVEVKGRIHFDLYPVIRRTINLPTYTLEAVYEAVFGKPKEKVYAEEIAQAWESGEGLERVARYSMEDAKVTYELGREFFPMEAQLSRLIGQSLWDVSRSSTGNLVEAELLRKAYKRNELAPNKPDERELARRRGGYAGGYVKEPERGLWDNIVYLDFRSLYPSIIITHNVSPDTLNREGCKEYDVAPEVGHKFCKDFPGFIPSLLGDLLEERQKIERKMKATVDPLEKKLLVYRQWLIKILANSFYGYYGYAKARWYCKECAESVTAWGREYIEMVIRELEEKFGFKVLYADTDGLHATIPGADAETVKKKAKEFLKYINPKLPGLLELEYEGFYVRGFFVTKKKYAVIDEEGKITTRGLEIVRRDWSEIAKETQARVLEAILKHGDVEEAVRIVKEVTEKLSKYEVPPEKLVIHEQITRDLRDYKATGPHVAVAKRLAARGVKIRPGTVISYIVLKGSGRIGDRAIPADEFDPTKHRYDAEYYIENQVLPAVERILKAFGYRKEDLRYQKTKQVGSGAWLKVKGKKGTEAYVEQKLISEEDLNSAVDHHHHHH

SEQ ID NO: 369 - DNA, 2409 bp, Artificial Sequence
  Description of Artificial Sequence:Thermococcus species 9degreesN-7 mutant DNA polymerase, 9degreesN mutant
atgattctcgataccgactacatcaccgagaacgggaagcccgtgataagggtcttcaagaaggagaacggcgagtttaaaatcgagtacgacagaaccttcgagccctacttctacgcccttctgaaggacgattctgcgatagaggacgtcaagaaggtaaccgcaaagaggcacggaacggttgtcaaggtgaagcgcgccgagaaggtgcagaagaagttcctcggcaggccgatagaggtctggaagctctacttcaaccatcctcaggacgtcccggcgattcgagacaggatacgcgcccaccccgctgtcgttgacatctacgagtacgacatacccttcgccaagcgctacctcatcgacaagggcctgattccgatggagggcgacgaggagcttacgatgctcgccttcgcgatcgcaaccctctatcacgagggcgaggagttcggaaccgggccgattctcatgataagctacgccgacgggagcgaggcgagggtgataacctggaagaagattgaccttccgtacgttgacgtcgtctcgaccgagaaggagatgattaagcgcttcctccgcgtcgtcagggagaaggaccccgacgtgctcatcacctacaacggcgacaacttcgacttcgcctacctgaagaagcgctgtgaggaactcggaataaagttcacactcggcagggacgggagcgagccgaagatacagcgaatgggcgaccgctttgccgttgaggtgaagggcaggattcacttcgacctctaccccgtcataaggcgcacgataaacctcccgacctacacccttgaggccgtttacgaggccgtctttggaaagcccaaggagaaggtttacgcagaggagatagcgcaggcctgggagagcggggagggccttgaaagggttgcaagatactcgatggaggacgctaaggtgacctacgagctgggaagggagttcttcccgatggaggcccagctttcgaggcttataggccagagcctctgggacgtctcgcgctcgagcaccggaaatttggtggaggcattcctcctgcggaaggcctacaagaggaacgagctcgccccaaacaagcccgacgagagggagctcgcgagacggcgcgggggctacgctggcgggtacgttaaggaaccagagcggggattgtgggacaacattgtgtatttagacttccgctcgctgtatccttcaatcatcataacccacaacgtctcgccggataccctcaaccgcgagggctgtaaagagtacgacgtcgcccctgaggttggacacaagttctgcaaggacttccccggcttcataccaagcctcctgggagatttgctcgaggagaggcagaagatagagcggaagatgaaggcaacggttgacccgctggagaagaaactcctcgtgtacaggcagtggcttataaaaatcctcgccaacagcgtgtacggctactacggctacgccaaggcccggtggtactgcaaggagtgcgccgagagcgttacggcctggggaagggagtatatagaaatggttatccgggaactcgaagaaaaattcggttttaaagttctctatgccgatacagacggtctccatgctaccattcccggagcagacgctgaaacagtcaagaaaaaagcaaaggagttcttaaaatacattaatccaaaactgcccggcctgctcgaacttgagtacgagggcttctacgtgaggggcttcttcgtcacgaagaagaagtacgctgtgatagacgaggagggcaagataaccacgaggggtcttgagattgtgaggcgcgactggagcgagatagcgaaggagacccaggccagggtcttagaggcgatactcaagcacggtgacgtcgaggaggccgttaggatagtcaaggaagtgacggaaaagctgagcaagtatgaggtcccgcccgagaagctggtaatccacgagcagataacgcgcgatttgagggattacaaagccaccggcccgcacgttgccgttgcgaagaggctcgcggcgcgtggagtgaaaatccggcccggcacggtgataagctacatcgtcctaaagggctctggaaggataggcgacagggcgattccagctgatgagttcgacccgacgaagcaccgctacgatgcggaatactacatcgagaaccaggttctcccggcggtggagaggattctaaaagccttcggctatcggaaggaggatttgcgctaccagaagacgaagcaggtcggctcgggcgcgtggctgaaggtgaaggggaagaagggtaccgaagcttacgtagaacaaaaactcatctcagaagaggatctgaatagcgccgtcgaccatcatcatcatcatcattga

SEQ ID NO: 370 - protein, 802 aa, Artificial Sequence
  Description of Artificial Sequence:Thermococcus species 9degreesN-7 mutant DNA polymerase, 9degreesN mutant
MILDTDYITENGKPVIRVFKKENGEFKIEYDRTFEPYFYALLKDDSAIEDVKKVTAKRHGTVVKVKRAEKVQKKFLGRPIEVWKLYFNHPQDVPAIRDRIRAHPAVVDIYEYDIPFAKRYLIDKGLIPMEGDEELTMLAFAIATLYHEGEEFGTGPILMISYADGSEARVITWKKIDLPYVDVVSTEKEMIKRFLRVVREKDPDVLITYNGDNFDFAYLKKRCEELGIKFTLGRDGSEPKIQRMGDRFAVEVKGRIHFDLYPVIRRTINLPTYTLEAVYEAVFGKPKEKVYAEEIAQAWESGEGLERVARYSMEDAKVTYELGREFFPMEAQLSRLIGQSLWDVSRSSTGNLVEAFLLRKAYKRNELAPNKPDERELARRRGGYAGGYVKEPERGLWDNIVYLDFRSLYPSIIITHNVSPDTLNREGCKEYDVAPEVGHKFCKDFPGFIPSLLGDLLEERQKIERKMKATVDPLEKKLLVYRQWLIKILANSVYGYYGYAKARWYCKECAESVTAWGREYIEMVIRELEEKFGFKVLYADTDGLHATIPGADAETVKKKAKEFLKYINPKLPGLLELEYEGFYVRGFFVTKKKYAVIDEEGKITTRGLEIVRRDWSEIAKETQARVLEAILKHGDVEEAVRIVKEVTEKLSKYEVPPEKLVIHEQITRDLRDYKATGPHVAVAKRLAARGVKIRPGTVISYIVLKGSGRIGDRAIPADEFDPTKHRYDAEYYIENQVLPAVERILKAFGYRKEDLRYQKTKQVGSGAWLKVKGKKGTEAYVEQKLISEEDLNSAVDHHHHHH

SEQ ID NO: 371 - DNA, 2409 bp, Artificial Sequence
  Description of Artificial Sequence:Thermococcus species 9degreesN-7 mutant DNA polymerase, 9degreesN mutant
atgattctcgataccgactacatcaccgagaacgggaagcccgtgataagggtcttcaagaaggagaacggcgagtttaaaatcgagtacgacagaaccttcgagccctacttctacgcccttctgaaggacgattctgcgatagaggacgtcaagaaggtaaccgcaaagaggcacggaacggttgtcaaggtgaagcgcgccgagaaggtgcagaagaagttcctcggcaggccgatagaggtctggaagctctacttcaaccatcctcaggacgtcccggcgattcgagacaggatacgcgcccaccccgctgtcgttgacatctacgagtacgacatacccttcgccaagcgctacctcatcgacaagggcctgattccgatggagggcgacgaggagcttacgatgctcgccttcgcgatcgcaaccctctatcacgagggcgaggagttcggaaccgggccgattctcatgataagctacgccgacgggagcgaggcgagggtgataacctggaagaagattgaccttccgtacgttgacgtcgtctcgaccgagaaggagatgattaagcgcttcctccgcgtcgtcagggagaaggaccccgacgtgctcatcacctacaacggcgacaacttcgacttcgcctacctgaagaagcgctgtgaggaactcggaataaagttcacactcggcagggacgggagcgagccgaagatacagcgaatgggcgaccgctttgccgttgaggtgaagggcaggattcacttcgacctctaccccgtcataaggcgcacgataaacctcccgacctacacccttgaggccgtttacgaggccgtctttggaaagcccaaggagaaggtttacgcagaggagatagcgcaggcctgggagagcggggagggccttgaaagggttgcaagatactcgatggaggacgctaaggtgacctacgagctgggaagggagttcttcccgatggaggcccagctttcgaggcttataggccagagcctctgggacgtctcgcgctcgagcaccggaaatttggtggaggcattcctcctgcggaaggcctacaagaggaacgagctcgccccaaacaagcccgacgagagggagctcgcgagacggcgcgggggctacgctggcgggtacgttaaggaaccagagcggggattgtgggacaacattgtgtatttagacttccgctcgctgtatccttcaatcatcataacccacaacgtctcgccggataccctcaaccgcgagggctgtaaagagtacgacgtcgcccctgaggttggacacaagttctgcaaggacttcccctggttcataccaagcctcctgggagatttgctcgaggagaggcagaagatagagcggaagatgaaggcaacggttgacccgctggagaagaaactcctcgtgtacaggcagtggcttataaaaatcctcgccaacagcttctacggctactacggctacgccaaggcccggtggtactgcaaggagtgcgccgagagcgttacggcctggggaagggagtatatagaaatggttatccgggaactcgaagaaaaattcggttttaaagttctctatgccgatacagacggtctccatgctaccattcccggagcagacgctgaaacagtcaagaaaaaagcaaaggagttcttaaaatacattaatccaaaactgcccggcctgctcgaacttgagtacgagggcttctacgtgaggggcttcttcgtcacgaagaagaagtacgctgtgatagacgaggagggcaagataaccacgaggggtcttgagattgtgaggcgcgactggagcgagatagcgaaggagacccaggccagggtcttagaggcgatactcaagcacggtgacgtcgaggaggccgttaggatagtcaaggaagtgacggaaaagctgagcaagtatgaggtcccgcccgagaagctggtaatccacgagcagataacgcgcgatttgagggattacaaagccaccggcccgcacgttgccgttgcgaagaggctcgcggcgcgtggagtgaaaatccggcccggcacggtgataagctacatcgtcctaaagggctctggaaggataggcgacagggcgattccagctgatgagttcgacccgacgaagcaccgctacgatgcggaatactacatcgagaaccaggttctcccggcggtggagaggattctaaaagccttcggctatcggaaggaggatttgcgctaccagaagacgaagcaggtcggctcgggcgcgtggctgaaggtgaaggggaagaagggtaccgaagcttacgtagaacaaaaactcatctcagaagaggatctgaatagcgccgtcgaccatcatcatcatcatcattga

SEQ ID NO: 372 - protein, 802 aa, Artificial Sequence
  Description of Artificial Sequence:Thermococcus species 9degreesN-7 mutant DNA polymerase, 9degreesN mutant
MILDTDYITENGKPVIRVFKKENGEFKIEYDRTFEPYFYALLKDDSAIEDVKKVTAKRHGTVVKVKRAEKVQKKFLGRPIEVWKLYFNHPQDVPAIRDRIRAHPAVVDIYEYDIPFAKRYLIDKGLIPMEGDEELTMLAFAIATLYHEGEEFGTGPILMISYADGSEARVITWKKIDLPYVDVVSTEKEMIKRFLRVVREKDPDVLITYNGDNFDFAYLKKRCEELGIKFTLGRDGSEPKIQRMGDRFAVEVKGRIHFDLYPVIRRTINLPTYTLEAVYEAVFGKPKEKVYAEEIAQAWESGEGLERVARYSMEDAKVTYELGREFFPMEAQLSRLIGQSLWDVSRSSTGNLVEAFLLRKAYKRNELAPNKPDERELARRRGGYAGGYVKEPERGLWDNIVYLDFRSLYPSIIITHNVSPDTLNREGCKEYDVAPEVGHKFCKDFPWFIPSLLGDLLEERQKIERKMKATVDPLEKKLLVYRQWLIKILANSFYGYYGYAKARWYCKECAESVTAWGREYIEMVIRELEEKFGFKVLYADTDGLHATIPGADAETVKKKAKEFLKYINPKLPGLLELEYEGFYVRGFFVTKKKYAVIDEEGKITTRGLEIVRRDWSEIAKETQARVLEAILKHGDVEEAVRIVKEVTEKLSKYEVPPEKLVIHEQITRDLRDYKATGPHVAVAKRLAARGVKIRPGTVISYIVLKGSGRIGDRAIPADEFDPTKHRYDAEYYIENQVLPAVERILKAFGYRKEDLRYQKTKQVGSGAWLKVKGKKGTEAYVEQKLISEEDLNSAVDHHHHHH

SEQ ID NO: 373 - DNA, 2409 bp, Artificial Sequence
  Description of Artificial Sequence:Thermococcus species 9degreesN-7 mutant DNA polymerase, 9degreesN mutant
atgattctcgataccgactacatcaccgagaacgggaagcccgtgataagggtcttcaagaaggagaacggcgagtttaaaatcgagtacgacagaaccttcgagccctacttctacgcccttctgaaggacgattctgcgatagaggacgtcaagaaggtaaccgcaaagaggcacggaacggttgtcaaggtgaagcgcgccgagaaggtgcagaagaagttcctcggcaggccgatagaggtctggaagctctacttcaaccatcctcaggacgtcccggcgattcgagacaggatacgcgcccaccccgctgtcgttgacatctacgagtacgacatacccttcgccaagcgctacctcatcgacaagggcctgattccgatggagggcgacgaggagcttacgatgctcgccttcgcgatcgcaaccctctatcacgagggcgaggagttcggaaccgggccgattctcatgataagctacgccgacgggagcgaggcgagggtgataacctggaagaagattgaccttccgtacgttgacgtcgtctcgaccgagaaggagatgattaagcgcttcctccgcgtcgtcagggagaaggaccccgacgtgctcatcacctacaacggcgacaacttcgacttcgcctacctgaagaagcgctgtgaggaactcggaataaagttcacactcggcagggacgggagcgagccgaagatacagcgaatgggcgaccgctttgccgttgaggtgaagggcaggattcacttcgacctctaccccgtcataaggcgcacgataaacctcccgacctacacccttgaggccgtttacgaggccgtctttggaaagcccaaggagaaggtttacgcagaggagatagcgcaggcctgggagagcggggagggccttgaaagggttgcaagatactcgatggaggacgctaaggtgacctacgagctgggaagggagttcttcccgatggaggcccagctttcgaggcttataggccagagcctctgggacgtctcgcgctcgagcaccggaaatttggtggaggcattcctcctgcggaaggcctacaagaggaacgagctcgccccaaacaagcccgacgagagggagctcgcgagacggcgcgggggctacgctggcgggtacgttaaggaaccagagcggggattgtgggacaacattgtgtatttagacttccgctcgctgtatccttcaatcatcataacccacaacgtctcgccggataccctcaaccgcgagggctgtaaagagtacgacgtcgcccctgaggttggacacaagttctgcaaggacttccccggcttcagtccaagcctcctgggagatttgctcgaggagaggcagaagatagagcggaagatgaaggcaacggttgacccgctggagaagaaactcctcgtgtacaggcagtggcttataaaaatcctcgccaacagcttctacggccactacggctacgccaaggcccggtggtactgcaaggagtgcgccgagagcgttacggcctggggaagggagtatatagaaatggttatccgggaactcgaagaaaaattcggttttaaagttctctatgccgatacagacggtctccatgctaccattcccggagcagacgctgaaacagtcaagaaaaaagcaaaggagttcttaaaatacattaatccaaaactgcccggcctgctcgaacttgagtacgagggcttctacgtgaggggcttcttcgtcacgaagaagaagtacgctgtgatagacgaggagggcaagataaccacgaggggtcttgagattgtgaggcgcgactggagcgagatagcgaaggagacccaggccagggtcttagaggcgatactcaagcacggtgacgtcgaggaggccgttaggatagtcaaggaagtgacggaaaagctgagcaagtatgaggtcccgcccgagaagctggtaatccacgagcagataacgcgcgatttgagggattacaaagccaccggcccgcacgttgccgttgcgaagaggctcgcggcgcgtggagtgaaaatccggcccggcacggtgataagctacatcgtcctaaagggctctggaaggataggcgacagggcgattccagctgatgagttcgacccgacgaagcaccgctacgatgcggaatactacatcgagaaccaggttctcccggcggtggagaggattctaaaagccttcggctatcggaaggaggatttgcgctaccagaagacgaagcaggtcggctcgggcgcgtggctgaaggtgaaggggaagaagggtaccgaagcttacgtagaacaaaaactcatctcagaagaggatctgaatagcgccgtcgaccatcatcatcatcatcattga

SEQ ID NO: 374 - protein, 802 aa, Artificial Sequence
  Description of Artificial Sequence:Thermococcus species 9degreesN-7 mutant DNA polymerase, 9degreesN mutant
MILDTDYITENGKPVIRVFKKENGEFKIEYDRTFEPYFYALLKDDSAIEDVKKVTAKRHGTVVKVKRAEKVQKKFLGRPIEVWKLYFNHPQDVPAIRDRIRAHPAVVDIYEYDIPFAKRYLIDKGLIPMEGDEELTMLAFAIATLYHEGEEFGTGPILMISYADGSEARVITWKKIDLPYVDVVSTEKEMIKRFLRVVREKDPDVLITYNGDNFDFAYLKKRCEELGIKFTLGRDGSEPKIQRMGDRFAVEVKGRIHFDLYPVIRRTINLPTYTLEAVYEAVFGKPKEKVYAEEIAQAWESGEGLERVARYSMEDAKVTYELGREFFPMEAQLSRLIGQSLWDVSRSSTGNLVEAFLLRKAYKRNELAPNKPDERELARRRGGYAGGYVKEPERGLWDNIVYLDFRSLYPSIIITHNVSPDTLNREGCKEYDVAPEVGHKFCKDFPGFSPSLLGDLLEERQKIERKMKATVDPLEKKLLVYRQWLIKILANSFYGHYGYAKARWYCKECAESVTAWGREYIEMVIRELEEKFGFKVLYADTDGLHATIPGADAETVKKKAKEFLKYINPKLPGLLELEYEGFYVRGFFVTKKKYAVIDEEGKITTRGLEIVRRDWSEIAKETQARVLEAILKHGDVEEAVRIVKEVTEKLSKYEVPPEKLVIHEQITRDLRDYKATGPHVAVAKRLAARGVKIRPGTVISYIVLKGSGRIGDRAIPADEFDPTKHRYDAEYYIENQVLPAVERILKAFGYRKEDLRYQKTKQVGSGAWLKVKGKKGTEAYVEQKLISEEDLNSAVDHHHHHH

SEQ ID NO: 375 - DNA, 2409 bp, Artificial Sequence
  Description of Artificial Sequence:Thermococcus species 9degreesN-7 mutant DNA polymerase, 9degreesN mutant
atgattctcgataccgactacatcaccgagaacgggaagcccgtgataagggtcttcaagaaggagaacggcgagtttaaaatcgagtacgacagaaccttcgagccctacttctacgcccttctgaaggacgattctgcgatagaggacgtcaagaaggtaaccgcaaagaggcacggaacggttgtcaaggtgaagcgcgccgagaaggtgcagaagaagttcctcggcaggccgatagaggtctggaagctctacttcaaccatcctcaggacgtcccggcgattcgagacaggatacgcgcccaccccgctgtcgttgacatctacgagtacgacatacccttcgccaagcgctacctcatcgacaagggcctgattccgatggagggcgacgaggagcttacgatgctcgccttcgcgatcgcaaccctctatcacgagggcgaggagttcggaaccgggccgattctcatgataagctacgccgacgggagcgaggcgagggtgataacctggaagaagattgaccttccgtacgttgacgtcgtctcgaccgagaaggagatgattaagcgcttcctccgcgtcgtcagggagaaggaccccgacgtgctcatcacctacaacggcgacaacttcgacttcgcctacctgaagaagcgctgtgaggaactcggaataaagttcacactcggcagggacgggagcgagccgaagatacagcgaatgggcgaccgctttgccgttgaggtgaagggcaggattcacttcgacctctaccccgtcataaggcgcacgataaacctcccgacctacacccttgaggccgtttacgaggccgtctttggaaagcccaaggagaaggtttacgcagaggagatagcgcaggcctgggagagcggggagggccttgaaagggttgcaagatactcgatggaggacgctaaggtgacctacgagctgggaagggagttcttcccgatggaggcccagctttcgaggcttataggccagagcctctgggacgtctcgcgctcgagcaccggaaatttggtggaggcattcctcctgcggaaggcctacaagaggaacgagctcgccccaaacaagcccgacgagagggagctcgcgagacggcgcgggggctacgctggcgggtacgttaaggaaccagagcggggattgtgggacaacattgtgtatttagacttccgctcgctgtatccttcaatcatcataacccacaacgtctcgccggataccctcaaccgcgagggctgtaaagagtacgacgtcgcccctgaggttggacacaagttctgcaaggacttccccggcttcataccaagcctcctgggagatttgctcgaggagaggcagaagatagagcggaagatgaaggcaacggttgacccgctggagaagaaactcctcgtgtacaggcagtggcttatagtcatcctcgccaacagcttctacggctactacggctacgccaaggcccggtggtactgcaaggagtgcgccgagagcgttacggcctggggaagggagtatatagaaatggttatccgggaactcgaagaaaaattcggttttaaagttctctatgccgatacagacggtctccatgctaccattcccggagcagacgctgaaacagtcaagaaaaaagcaaaggagttcttaaaatacattaatccaaaactgcccggcctgctcgaacttgagtacgagggcttctacgtgaggggcttcttcgtcacgaagaagaagtacgctgtgatagacgaggagggcaagataaccacgaggggtcttgagattgtgaggcgcgactggagcgagatagcgaaggagacccaggccagggtcttagaggcgatactcaagcacggtgacgtcgaggaggccgttaggatagtcaaggaagtgacggaaaagctgagcaagtatgaggtcccgcccgagaagctggtaatccacgagcagataacgcgcgatttgagggattacaaagccaccggcccgcacgttgccgttgcgaagaggctcgcggcgcgtggagtgaaaatccggcccggcacggtgataagctacatcgtcctaaagggctctggaaggataggcgacagggcgattccagctgatgagttcgacccgacgaagcaccgctacgatgcggaatactacatcgagaaccaggttctcccggcggtggagaggattctaaaagccttcggctatcggaaggaggatttgcgctaccagaagacgaagcaggtcggctcgggcgcgtggctgaaggtgaaggggaagaagggtaccgaagcttacgtagaacaaaaactcatctcagaagaggatctgaatagcgccgtcgaccatcatcatcatcatcattga

SEQ ID NO: 376 - protein, 802 aa, Artificial Sequence
  Description of Artificial Sequence:Thermococcus species 9degreesN-7 mutant DNA polymerase, 9degreesN mutant
MILDTDYITENGKPVIRVFKKENGEFKIEYDRTFEPYFYALLKDDSAIEDVKKVTAKRHGTVVKVKRAEKVQKKFLGRPIEVWKLYFNHPQDVPAIRDRIRAHPAVVDIYEYDIPFAKRYLIDKGLIPMEGDEELTMLAFAIATLYHEGEEFGTGPILMISYADGSEARVITWKKIDLPYVDVVSTEKEMIKRFLRVVREKDPDVLITYNGDNFDFAYLKKRCEELGIKFTLGRDGSEPKIQRMGDRFAVEVKGRIHFDLYPVIRRTINLPTYTLEAVYEAVFGKPKEKVYAEEIAQAWESGEGLERVARYSMEDAKVTYELGREFFPMEAQLSRLIGQSLWDVSRSSTGNLVEAFLLRKAYKRNELAPNKPDERELARRRGGYAGGYVKEPERGLWDNIVYLDFRSLYPSIIITHNVSPDTLNREGCKEYDVAPEVGHKFCKDFPGFIPSLLGDLLEERQKIERKMKATVDPLEKKLLVYRQWLIVILANSFYGYYGYAKARWYCKECAESVTAWGREYIEMVIRELEEKFGFKVLYADTDGLHATIPGADAETVKKKAKEFLKYINPKLPGLLELEYEGFYVRGFFVTKKKYAVIDEEGKITTRGLEIVRRDWSEIAKETQARVLEAILKHGDVEEAVRIVKEVTEKLSKYEVPPEKLVIHEQITRDLRDYKATGPHVAVAKRLAARGVKIRPGTVISYIVLKGSGRIGDRAIPADEFDPTKHRYDAEYYIENQVLPAVERILKAFGYRKEDLRYQKTKQVGSGAWLKVKGKKGTEAYVEQKLISEEDLNSAVDHHHHHH

SEQ ID NO: 377 - DNA, 2409 bp, Artificial Sequence
  Description of Artificial Sequence:Thermococcus species 9degreesN-7 mutant DNA polymerase, 9degreesN mutant
atgattctcgataccgactacatcaccgagaacgggaagcccgtgataagggtcttcaagaaggagaacggcgagtttaaaatcgagtacgacagaaccttcgagccctacttctacgcccttctgaaggacgattctgcgatagaggacgtcaagaaggtaaccgcaaagaggcacggaacggttgtcaaggtgaagcgcgccgagaaggtgcagaagaagttcctcggcaggccgatagaggtctggaagctctacttcaaccatcctcaggacgtcccggcgattcgagacaggatacgcgcccaccccgctgtcgttgacatctacgagtacgacatacccttcgccaagcgctacctcatcgacaagggcctgattccgatggagggcgacgaggagcttacgatgctcgccttcgcgatcgcaaccctctatcacgagggcgaggagttcggaaccgggccgattctcatgataagctacgccgacgggagcgaggcgagggtgataacctggaagaagattgaccttccgtacgttgacgtcgtctcgaccgagaaggagatgattaagcgcttcctccgcgtcgtcagggagaaggaccccgacgtgctcatcacctacaacggcgacaacttcgacttcgcctacctgaagaagcgctgtgaggaactcggaataaagttcacactcggcagggacgggagcgagccgaagatacagcgaatgggcgaccgctttgccgttgaggtgaagggcaggattcacttcgacctctaccccgtcataaggcgcacgataaacctcccgacctacacccttgaggccgtttacgaggccgtctttggaaagcccaaggagaaggtttacgcagaggagatagcgcaggcctgggagagcggggagggccttgaaagggttgcaagatactcgatggaggacgctaaggtgacctacgagctgggaagggagttcttcccgatggaggcccagctttcgaggcttataggccagagcctctgggacgtctcgcgctcgagcaccggaaatttggtggaggcattcctcctgcggaaggcctacaagaggaacgagctcgccccaaacaagcccgacgagagggagctcgcgagacggcgcgggggctacgctggcgggtacgttaaggaaccagagcggggattgtgggacaacattgtgtatttagacttccgctcgctgtatccttcaatcatcataacccacaacgtctcgccggataccctcaaccgcgagggctgtaaagagtacgacgtcgcccctgaggttggacacaagttctgcaaggacttccccggcttcataccaagcctcctgggagatttgctcgaggagaggcagaagatagagcggaagatgaaggcaacggttgacccgctggagaagaaactcctcgtgtacaggcagtggcttatatacatcctcgccaacagcttctacggctactacggctacgccaaggcccggtggtactgcaaggagtgcgccgagagcgttacggcctggggaagggagtatatagaaatggttatccgggaactcgaagaaaaattcggttttaaagttctctatgccgatacagacggtctccatgctaccattcccggagcagacgctgaaacagtcaagaaaaaagcaaaggagttcttaaaatacattaatccaaaactgcccggcctgctcgaacttgagtacgagggcttctacgtgaggggcttcttcgtcacgaagaagaagtacgctgtgatagacgaggagggcaagataaccacgaggggtcttgagattgtgaggcgcgactggagcgagatagcgaaggagacccaggccagggtcttagaggcgatactcaagcacggtgacgtcgaggaggccgttaggatagtcaaggaagtgacggaaaagctgagcaagtatgaggtcccgcccgagaagctggtaatccacgagcagataacgcgcgatttgagggattacaaagccaccggcccgcacgttgccgttgcgaagaggctcgcggcgcgtggagtgaaaatccggcccggcacggtgataagctacatcgtcctaaagggctctggaaggataggcgacagggcgattccagctgatgagttcgacccgacgaagcaccgctacgatgcggaatactacatcgagaaccaggttctcccggcggtggagaggattctaaaagccttcggctatcggaaggaggatttgcgctaccagaagacgaagcaggtcggctcgggcgcgtggctgaaggtgaaggggaagaagggtaccgaagcttacgtagaacaaaaactcatctcagaagaggatctgaatagcgccgtcgaccatcatcatcatcatcattga

SEQ ID NO: 378 - protein, 802 aa, Artificial Sequence
  Description of Artificial Sequence:Thermococcus species 9degreesN-7 mutant DNA polymerase, 9degreesN mutant
MILDTDYITENGKPVIRVFKKENGEFKIEYDRTFEPYFYALLKDDSAIEDVKKVTAKRHGTVVKVKRAEKVQKKFLGRPIEVWKLYFNHPQDVPAIRDRIRAHPAVVDIYEYDIPFAKRYLIDKGLIPMEGDEELTMLAFAIATLYHEGEEFGTGPILMISYADGSEARVITWKKIDLPYVDVVSTEKEMIKRFLRVVREKDPDVLITYNGDNFDFAYLKKRCEELGIKFTLGRDGSEPKIQRMGDRFAVEVKGRIHFDLYPVIRRTINLPTYTLEAVYEAVFGKPKEKVYAEEIAQAWESGEGLERVARYSMEDAKVTYELGREFFPMEAQLSRLIGQSLWDVSRSSTGNLVEAFLLRKAYKRNELAPNKPDERELARRRGGYAGGYVKEPERGLWDNIVYLDFRSLYPSIIITHNVSPDTLNREGCKEYDVAPEVGHKFCKDFPGFIPSLLGDLLEERQKIERKMKATVDPLEKKLLVYRQWLIYILANSFYGYYGYAKARWYCKECAESVTAWGREYIEMVIRELEEKFGFKVLYADTDGLHATIPGADAETVKKKAKEFLKYINPKLPGLLELEYEGFYVRGFFVTKKKYAVIDEEGKITTRGLEIVRRDWSEIAKETQARVLEAILKHGDVEEAVRIVKEVTEKLSKYEVPPEKLVIHEQITRDLRDYKATGPHVAVAKRLAARGVKIRPGTVISYIVLKGSGRIGDRAIPADEFDPTKHRYDAEYYIENQVLPAVERILKAFGYRKEDLRYQKTKQVGSGAWLKVKGKKGTEAYVEQKLISEEDLNSAVDHHHHHH

SEQ ID NO: 379 - DNA, 2409 bp, Artificial Sequence
  Description of Artificial Sequence:Thermococcus species 9degreesN-7 mutant DNA polymerase, 9degreesN mutant
atgattctcgataccgactacatcaccgagaacgggaagcccgtgataagggtcttcaagaaggagaacggcgagtttaaaatcgagtacgacagaaccttcgagccctacttctacgcccttctgaaggacgattctgcgatagaggacgtcaagaaggtaaccgcaaagaggcacggaacggttgtcaaggtgaagcgcgccgagaaggtgcagaagaagttcctcggcaggccgatagaggtctggaagctctacttcaaccatcctcaggacgtcccggcgattcgagacaggatacgcgcccaccccgctgtcgttgacatctacgagtacgacatacccttcgccaagcgctacctcatcgacaagggcctgattccgatggagggcgacgaggagcttacgatgctcgccttcgcgatcgcaaccctctatcacgagggcgaggagttcggaaccgggccgattctcatgataagctacgccgacgggagcgaggcgagggtgataacctggaagaagattgaccttccgtacgttgacgtcgtctcgaccgagaaggagatgattaagcgcttcctccgcgtcgtcagggagaaggaccccgacgtgctcatcacctacaacggcgacaacttcgacttcgcctacctgaagaagcgctgtgaggaactcggaataaagttcacactcggcagggacgggagcgagccgaagatacagcgaatgggcgaccgctttgccgttgaggtgaagggcaggattcacttcgacctctaccccgtcataaggcgcacgataaacctcccgacctacacccttgaggccgtttacgaggccgtctttggaaagcccaaggagaaggtttacgcagaggagatagcgcaggcctgggagagcggggagggccttgaaagggttgcaagatactcgatggaggacgctaaggtgacctacgagctgggaagggagttcttcccgatggaggcccagctttcgaggcttataggccagagcctctgggacgtctcgcgctcgagcaccggaaatttggtggaggcattcctcctgcggaaggcctacaagaggaacgagctcgccccaaacaagcccgacgagagggagctcgcgagacggcgcgggggctacgctggcgggtacgttaaggaaccagagcggggattgtgggacaacattgtgtatttagacttccgctcgctgtatccttcaatcatcataacccacaacgtctcgccggataccctcaaccgcgagggctgtaaagagtacgacgtcgcccctgaggttggacacaagttctgcaaggacttccccggcttcataccaagcctcctgggagatttgctcgaggagaggcagaagatagagcggaagatgaaggcaacggttgacccgctggagaagaaactcctcgtgtacaggcagtggcttatatggatcctcgccaacagcttctacggctactacggctacgccaaggcccggtggtactgcaaggagtgcgccgagagcgttacggcctggggaagggagtatatagaaatggttatccgggaactcgaagaaaaattcggttttaaagttctctatgccgatacagacggtctccatgctaccattcccggagcagacgctgaaacagtcaagaaaaaagcaaaggagttcttaaaatacattaatccaaaactgcccggcctgctcgaacttgagtacgagggcttctacgtgaggggcttcttcgtcacgaagaagaagtacgctgtgatagacgaggagggcaagataaccacgaggggtcttgagattgtgaggcgcgactggagcgagatagcgaaggagacccaggccagggtcttagaggcgatactcaagcacggtgacgtcgaggaggccgttaggatagtcaaggaagtgacggaaaagctgagcaagtatgaggtcccgcccgagaagctggtaatccacgagcagataacgcgcgatttgagggattacaaagccaccggcccgcacgttgccgttgcgaagaggctcgcggcgcgtggagtgaaaatccggcccggcacggtgataagctacatcgtcctaaagggctctggaaggataggcgacagggcgattccagctgatgagttcgacccgacgaagcaccgctacgatgcggaatactacatcgagaaccaggttctcccggcggtggagaggattctaaaagccttcggctatcggaaggaggatttgcgctaccagaagacgaagcaggtcggctcgggcgcgtggctgaaggtgaaggggaagaagggtaccgaagcttacgtagaacaaaaactcatctcagaagaggatctgaatagcgccgtcgaccatcatcatcatcatcattga

SEQ ID NO: 380 - protein, 802 aa, Artificial Sequence
  Description of Artificial Sequence:Thermococcus species 9degreesN-7 mutant DNA polymerase, 9degreesN mutant
MILDTDYITENGKPVIRVFKKENGEFKIEYDRTFEPYFYALLKDDSAIEDVKKVTAKRHGTVVKVKRAEKVQKKFLGRPIEVWKLYFNHPQDVPAIRDRIRAHPAVVDIYEYDIPFAKRYLIDKGLIPMEGDEELTMLAFAIATLYHEGEEFGTGPILMISYADGSEARVITWKKIDLPYVDVVSTEKEMIKRFLRVVREKDPDVLITYNGDNFDFAYLKKRCEELGIKFTLGRDGSEPKIQRMGDRFAVEVKGRIHFDLYPVIRRTINLPTYTLEAVYEAVFGKPKEKVYAEEIAQAWESGEGLERVARYSMEDAKVTYELGREFFPMEAQLSRLIGQSLWDVSRSSTGNLVEAFLLRKAYKRNELAPNKPDERELARRRGGYAGGYVKEPERGLWDNIVYLDFRSLYPSIIITHNVSPDTLNREGCKEYDVAPEVGHKFCKDFPGFIPSLLGDLLEERQKIERKMKATVDPLEKKLLVYRQWLIWILANSFYGYYGYAKARWYCKECAESVTAWGREYIEMVIRELEEKFGFKVLYADTDGLHATIPGADAETVKKKAKEFLKYINPKLPGLLELEYEGFYVRGFFVTKKKYAVIDEEGKITTRGLEIVRRDWSEIAKETQARVLEAILKHGDVEEAVRIVKEVTEKLSKYEVPPEKLVIHEQITRDLRDYKATGPHVAVAKRLAARGVKIRPGTVISYIVLKGSGRIGDRAIPADEFDPTKHRYDAEYYIENQVLPAVERILKAFGYRKEDLRYQKTKQVGSGAWLKVKGKKGTEAYVEQKLISEEDLNSAVDHHHHHH

SEQ ID NO: 381 - DNA, 2409 bp, Artificial Sequence
  Description of Artificial Sequence:Thermococcus species 9degreesN-7 mutant DNA polymerase, 9degreesN mutant
atgattctcgataccgactacatcaccgagaacgggaagcccgtgataagggtcttcaagaaggagaacggcgagtttaaaatcgagtacgacagaaccttcgagccctacttctacgcccttctgaaggacgattctgcgatagaggacgtcaagaaggtaaccgcaaagaggcacggaacggttgtcaaggtgaagcgcgccgagaaggtgcagaagaagttcctcggcaggccgatagaggtctggaagctctacttcaaccatcctcaggacgtcccggcgattcgagacaggatacgcgcccaccccgctgtcgttgacatctacgagtacgacatacccttcgccaagcgctacctcatcgacaagggcctgattccgatggagggcgacgaggagcttacgatgctcgccttcgcgatcgcaaccctctatcacgagggcgaggagttcggaaccgggccgattctcatgataagctacgccgacgggagcgaggcgagggtgataacctggaagaagattgaccttccgtacgttgacgtcgtctcgaccgagaaggagatgattaagcgcttcctccgcgtcgtcagggagaaggaccccgacgtgctcatcacctacaacggcgacaacttcgacttcgcctacctgaagaagcgctgtgaggaactcggaataaagttcacactcggcagggacgggagcgagccgaagatacagcgaatgggcgaccgctttgccgttgaggtgaagggcaggattcacttcgacctctaccccgtcataaggcgcacgataaacctcccgacctacacccttgaggccgtttacgaggccgtctttggaaagcccaaggagaaggtttacgcagaggagatagcgcaggcctgggagagcggggagggccttgaaagggttgcaagatactcgatggaggacgctaaggtgacctacgagctgggaagggagttcttcccgatggaggcccagctttcgaggcttataggccagagcctctgggacgtctcgcgctcgagcaccggaaatttggtggaggcattcctcctgcggaaggcctacaagaggaacgagctcgccccaaacaagcccgacgagagggagctcgcgagacggcgcgggggctacgctggcgggtacgttaaggaaccagagcggggattgtgggacaacattgtgtatttagacttccgctcgtggtatccttcaatcatcataacccacaacgtctcgccggataccctcaaccgcgagggctgtaaagagtacgacgtcgcccctgaggttggacacaagttctgcaaggacttccccggcttcataccaagcctcctgggagatttgctcgaggagaggcagaagatagagcggaagatgaaggcaacggttgacccgctggagaagaaactcctcgtgtacaggcagtggcttataaaaatcctcgccaacagcttctacggctactacggctacgccaaggcccggtggtactgcaaggagtgcgccgagagcgttacggcctggggaagggagtatatagaaatggttatccgggaactcgaagaaaaattcggttttaaagttctctatgccgatacagacggtctccatgctaccattcccggagcagacgctgaaacagtcaagaaaaaagcaaaggagttcttaaaatacattaatccaaaactgcccggcctgctcgaacttgagtacgagggcttctacgtgaggggcttcttcgtcacgaagaagaagtacgctgtgatagacgaggagggcaagataaccacgaggggtcttgagattgtgaggcgcgactggagcgagatagcgaaggagacccaggccagggtcttagaggcgatactcaagcacggtgacgtcgaggaggccgttaggatagtcaaggaagtgacggaaaagctgagcaagtatgaggtcccgcccgagaagctggtaatccacgagcagataacgcgcgatttgagggattacaaagccaccggcccgcacgttgccgttgcgaagaggctcgcggcgcgtggagtgaaaatccggcccggcacggtgataagctacatcgtcctaaagggctctggaaggataggcgacagggcgattccagctgatgagttcgacccgacgaagcaccgctacgatgcggaatactacatcgagaaccaggttctcccggcggtggagaggattctaaaagccttcggctatcggaaggaggatttgcgctaccagaagacgaagcaggtcggctcgggcgcgtggctgaaggtgaaggggaagaagggtaccgaagcttacgtagaacaaaaactcatctcagaagaggatctgaatagcgccgtcgaccatcatcatcatcatcattga

SEQ ID NO: 382 - protein, 802 aa, Artificial Sequence
  Description of Artificial Sequence:Thermococcus species 9degreesN-7 mutant DNA polymerase, 9degreesN mutant
MILDTDYITENGKPVIRVFKKENGEFKIEYDRTFEPYFYALLKDDSAIEDVKKVTAKRHGTVVKVKRAEKVQKKFLGRPIEVWKLYFNHPQDVPAIRDRIRAHPAVVDIYEYDIPFAKRYLIDKGLIPMEGDEELTMLAFAIATLYHEGEEFGTGPILMISYADGSEARVITWKKIDLPYVDVVSTEKEMIKRFLRVVREKDPDVLITYNGDNFDFAYLKKRCEELGIKFTLGRDGSEPKIQRMGDRFAVEVKGRIHFDLYPVIRRTINLPTYTLEAVYEAVFGKPKEKVYAEEIAQAWESGEGLERVARYSMEDAKVTYELGREFFPMEAQLSRLIGQSLWDVSRSSTGNLVEAFLLRKAYKRNELAPNKPDERELARRRGGYAGGYVKEPERGLWDNIVYLDFRSWYPSIIITHNVSPDTLNREGCKEYDVAPEVGHKFCKDFPGFIPSLLGDLLEERQKIERKMKATVDPLEKKLLVYRQWLIKILANSFYGYYGYAKARWYCKECAESVTAWGREYIEMVIRELEEKFGFKVLYADTDGLHATIPGADAETVKKKAKEFLKYINPKLPGLLELEYEGFYVRGFFVTKKKYAVIDEEGKITTRGLEIVRRDWSEIAKETQARVLEAILKHGDVEEAVRIVKEVTEKLSKYEVPPEKLVIHEQITRDLRDYKATGPHVAVAKRLAARGVKIRPGTVISYIVLKGSGRIGDRAIPADEFDPTKHRYDAEYYIENQVLPAVERILKAFGYRKEDLRYQKTKQVGSGAWLKVKGKKGTEAYVEQKLISEEDLNSAVDHHHHHH

SEQ ID NO: 383 - DNA, 2409 bp, Artificial Sequence
  Description of Artificial Sequence:Thermococcus species 9degreesN-7 mutant DNA polymerase, 9degreesN mutant
atgattctcgataccgactacatcaccgagaacgggaagcccgtgataagggtcttcaagaaggagaacggcgagtttaaaatcgagtacgacagaaccttcgagccctacttctacgcccttctgaaggacgattctgcgatagaggacgtcaagaaggtaaccgcaaagaggcacggaacggttgtcaaggtgaagcgcgccgagaaggtgcagaagaagttcctcggcaggccgatagaggtctggaagctctacttcaaccatcctcaggacgtcccggcgattcgagacaggatacgcgcccaccccgctgtcgttgacatctacgagtacgacatacccttcgccaagcgctacctcatcgacaagggcctgattccgatggagggcgacgaggagcttacgatgctcgccttcgcgatcgcaaccctctatcacgagggcgaggagttcggaaccgggccgattctcatgataagctacgccgacgggagcgaggcgagggtgataacctggaagaagattgaccttccgtacgttgacgtcgtctcgaccgagaaggagatgattaagcgcttcctccgcgtcgtcagggagaaggaccccgacgtgctcatcacctacaacggcgacaacttcgacttcgcctacctgaagaagcgctgtgaggaactcggaataaagttcacactcggcagggacgggagcgagccgaagatacagcgaatgggcgaccgctttgccgttgaggtgaagggcaggattcacttcgacctctaccccgtcataaggcgcacgataaacctcccgacctacacccttgaggccgtttacgaggccgtctttggaaagcccaaggagaaggtttacgcagaggagatagcgcaggcctgggagagcggggagggccttgaaagggttgcaagatactcgatggaggacgctaaggtgacctacgagctgggaagggagttcttcccgatggaggcccagctttcgaggcttataggccagagcctctgggacgtctcgcgctcgagcaccggaaatttggtggaggcattcctcctgcggaaggcctacaagaggaacgagctcgccccaaacaagcccgacgagagggagctcgcgagacggcgcgggggctacgctggcgggtacgttaaggaaccagagcggggattgtgggacaacattgtgtatttagacttccgctcggagtatccttcaatcatcataacccacaacgtctcgccggataccctcaaccgcgagggctgtaaagagtacgacgtcgcccctgaggttggacacaagttctgcaaggacttccccggcttcataccaagcctcctgggagatttgctcgaggagaggcagaagatagagcggaagatgaaggcaacggttgacccgctggagaagaaactcctcgtgtacaggcagtggcttataaaaatcctcgccaacagcttctacggctactacggctacgccaaggcccggtggtactgcaaggagtgcgccgagagcgttacggcctggggaagggagtatatagaaatggttatccgggaactcgaagaaaaattcggttttaaagttctctatgccgatacagacggtctccatgctaccattcccggagcagacgctgaaacagtcaagaaaaaagcaaaggagttcttaaaatacattaatccaaaactgcccggcctgctcgaacttgagtacgagggcttctacgtgaggggcttcttcgtcacgaagaagaagtacgctgtgatagacgaggagggcaagataaccacgaggggtcttgagattgtgaggcgcgactggagcgagatagcgaaggagacccaggccagggtcttagaggcgatactcaagcacggtgacgtcgaggaggccgttaggatagtcaaggaagtgacggaaaagctgagcaagtatgaggtcccgcccgagaagctggtaatccacgagcagataacgcgcgatttgagggattacaaagccaccggcccgcacgttgccgttgcgaagaggctcgcggcgcgtggagtgaaaatccggcccggcacggtgataagctacatcgtcctaaagggctctggaaggataggcgacagggcgattccagctgatgagttcgacccgacgaagcaccgctacgatgcggaatactacatcgagaaccaggttctcccggcggtggagaggattctaaaagccttcggctatcggaaggaggatttgcgctaccagaagacgaagcaggtcggctcgggcgcgtggctgaaggtgaaggggaagaagggtaccgaagcttacgtagaacaaaaactcatctcagaagaggatctgaatagcgccgtcgaccatcatcatcatcatcattga

SEQ ID NO: 384 - protein, 802 aa, Artificial Sequence
  Description of Artificial Sequence:Thermococcus species 9degreesN-7 mutant DNA polymerase, 9degreesN mutant
MILDTDYITENGKPVIRVFKKENGEFKIEYDRTFEPYFYALLKDDSAIEDVKKVTAKRHGTVVKVKRAEKVQKKFLGRPIEVWKLYFNHPQDVPAIRDRIRAHPAVVDIYEYDIPFAKRYLIDKGLIPMEGDEELTMLAFAIATLYHEGEEFGTGPILMISYADGSEARVITWKKIDLPYVDVVSTEKEMIKRFLRVVREKDPDVLITYNGDNFDFAYLKKRCEELGIKFTLGRDGSEPKIQRMGDRFAVEVKGRIHFDLYPVIRRTINLPTYTLEAVYEAVFGKPKEKVYAEEIAQAWESGEGLERVARYSMEDAKVTYELGREFFPMEAQLSRLIGQSLWDVSRSSTGNLVEAFLLRKAYKRNELAPNKPDERELARRRGGYAGGYVKEPERGLWDNIVYLDFRSEYPSIIITHNVSPDTLNREGCKEYDVAPEVGHKFCKDFPGFIPSLLGDLLEERQKIERKMKATVDPLEKKLLVYRQWLIKILANSFYGYYGYAKARWYCKECAESVTAWGREYIEMVIRELEEKFGFKVLYADTDGLHATIPGADAETVKKKAKEFLKYINPKLPGLLELEYEGFYVRGFFVTKKKYAVIDEEGKITTRGLEIVRRDWSEIAKETQARVLEAILKHGDVEEAVRIVKEVTEKLSKYEVPPEKLVIHEQITRDLRDYKATGPHVAVAKRLAARGVKIRPGTVISYIVLKGSGRIGDRAIPADEFDPTKHRYDAEYYIENQVLPAVERILKAFGYRKEDLRYQKTKQVGSGAWLKVKGKKGTEAYVEQKLISEEDLNSAVDHHHHHH

SEQ ID NO: 385 - DNA, 2409 bp, Artificial Sequence
  Description of Artificial Sequence:Thermococcus species 9degreesN-7 mutant DNA polymerase, 9degreesN mutant
atgattctcgataccgactacatcaccgagaacgggaagcccgtgataagggtcttcaagaaggagaacggcgagtttaaaatcgagtacgacagaaccttcgagccctacttctacgcccttctgaaggacgattctgcgatagaggacgtcaagaaggtaaccgcaaagaggcacggaacggttgtcaaggtgaagcgcgccgagaaggtgcagaagaagttcctcggcaggccgatagaggtctggaagctctacttcaaccatcctcaggacgtcccggcgattcgagacaggatacgcgcccaccccgctgtcgttgacatctacgagtacgacatacccttcgccaagcgctacctcatcgacaagggcctgattccgatggagggcgacgaggagcttacgatgctcgccttcgcgatcgcaaccctctatcacgagggcgaggagttcggaaccgggccgattctcatgataagctacgccgacgggagcgaggcgagggtgataacctggaagaagattgaccttccgtacgttgacgtcgtctcgaccgagaaggagatgattaagcgcttcctccgcgtcgtcagggagaaggaccccgacgtgctcatcacctacaacggcgacaacttcgacttcgcctacctgaagaagcgctgtgaggaactcggaataaagttcacactcggcagggacgggagcgagccgaagatacagcgaatgggcgaccgctttgccgttgaggtgaagggcaggattcacttcgacctctaccccgtcataaggcgcacgataaacctcccgacctacacccttgaggccgtttacgaggccgtctttggaaagcccaaggagaaggtttacgcagaggagatagcgcaggcctgggagagcggggagggccttgaaagggttgcaagatactcgatggaggacgctaaggtgacctacgagctgggaagggagttcttcccgatggaggcccagctttcgaggcttataggccagagcctctgggacgtctcgcgctcgagcaccggaaatttggtggaggcattcctcctgcggaaggcctacaagaggaacgagctcgccccaaacaagcccgacgagagggagctcgcgagacggcgcgggggctacgctggcgggtacgttaaggaaccagagcggggattgtgggacaacattgtgtatttagacttccgctcgcactatccttcaatcatcataacccacaacgtctcgccggataccctcaaccgcgagggctgtaaagagtacgacgtcgcccctgaggttggacacaagttctgcaaggacttccccggcttcataccaagcctcctgggagatttgctcgaggagaggcagaagatagagcggaagatgaaggcaacggttgacccgctggagaagaaactcctcgtgtacaggcagtggcttataaaaatcctcgccaacagcttctacggctactacggctacgccaaggcccggtggtactgcaaggagtgcgccgagagcgttacggcctggggaagggagtatatagaaatggttatccgggaactcgaagaaaaattcggttttaaagttctctatgccgatacagacggtctccatgctaccattcccggagcagacgctgaaacagtcaagaaaaaagcaaaggagttcttaaaatacattaatccaaaactgcccggcctgctcgaacttgagtacgagggcttctacgtgaggggcttcttcgtcacgaagaagaagtacgctgtgatagacgaggagggcaagataaccacgaggggtcttgagattgtgaggcgcgactggagcgagatagcgaaggagacccaggccagggtcttagaggcgatactcaagcacggtgacgtcgaggaggccgttaggatagtcaaggaagtgacggaaaagctgagcaagtatgaggtcccgcccgagaagctggtaatccacgagcagataacgcgcgatttgagggattacaaagccaccggcccgcacgttgccgttgcgaagaggctcgcggcgcgtggagtgaaaatccggcccggcacggtgataagctacatcgtcctaaagggctctggaaggataggcgacagggcgattccagctgatgagttcgacccgacgaagcaccgctacgatgcggaatactacatcgagaaccaggttctcccggcggtggagaggattctaaaagccttcggctatcggaaggaggatttgcgctaccagaagacgaagcaggtcggctcgggcgcgtggctgaaggtgaaggggaagaagggtaccgaagcttacgtagaacaaaaactcatctcagaagaggatctgaatagcgccgtcgaccatcatcatcatcatcattga

SEQ ID NO: 386 - protein, 802 aa, Artificial Sequence
  Description of Artificial Sequence:Thermococcus species 9degreesN-7 mutant DNA polymerase, 9degreesN mutant
MILDTDYITENGKPVIRVFKKENGEFKIEYDRTFEPYFYALLKDDSAIEDVKKVTAKRHGTVVKVKRAEKVQKKFLGRPIEVWKLYFNHPQDVPAIRDRIRAHPAVVDIYEYDIPFAKRYLIDKGLIPMEGDEELTMLAFAIATLYHEGEEFGTGPILMISYADGSEARVITWKKIDLPYVDVVSTEKEMIKRFLRVVREKDPDVLITYNGDNFDFAYLKKRCEELGIKFTLGRDGSEPKIQRMGDRFAVEVKGRIHFDLYPVIRRTINLPTYTLEAVYEAVFGKPKEKVYAEEIAQAWESGEGLERVARYSMEDAKVTYELGREFFPMEAQLSRLIGQSLWDVSRSSTGNLVEAFLLRKAYKRNELAPNKPDERELARRRGGYAGGYVKEPERGLWDNIVYLDFRSHYPSIIITHNVSPDTLNREGCKEYDVAPEVGHKFCKDFPGFIPSLLGDLLEERQKIERKMKATVDPLEKKLLVYRQWLIKILANSFYGYYGYAKARWYCKECAESVTAWGREYIEMVIRELEEKFGFKVLYADTDGLHATIPGADAETVKKKAKEFLKYINPKLPGLLELEYEGFYVRGFFVTKKKYAVIDEEGKITTRGLEIVRRDWSEIAKETQARVLEAILKHGDVEEAVRIVKEVTEKLSKYEVPPEKLVIHEQITRDLRDYKATGPHVAVAKRLAARGVKIRPGTVISYIVLKGSGRIGDRAIPADEFDPTKHRYDAEYYIENQVLPAVERILKAFGYRKEDLRYQKTKQVGSGAWLKVKGKKGTEAYVEQKLISEEDLNSAVDHHHHHH

SEQ ID NO: 387 - DNA, 2409 bp, Artificial Sequence
  Description of Artificial Sequence:Thermococcus species 9degreesN-7 mutant DNA polymerase, 9degreesN mutant
atgattctcgataccgactacatcaccgagaacgggaagcccgtgataagggtcttcaagaaggagaacggcgagtttaaaatcgagtacgacagaaccttcgagccctacttctacgcccttctgaaggacgattctgcgatagaggacgtcaagaaggtaaccgcaaagaggcacggaacggttgtcaaggtgaagcgcgccgagaaggtgcagaagaagttcctcggcaggccgatagaggtctggaagctctacttcaaccatcctcaggacgtcccggcgattcgagacaggatacgcgcccaccccgctgtcgttgacatctacgagtacgacatacccttcgccaagcgctacctcatcgacaagggcctgattccgatggagggcgacgaggagcttacgatgctcgccttcgcgatcgcaaccctctatcacgagggcgaggagttcggaaccgggccgattctcatgataagctacgccgacgggagcgaggcgagggtgataacctggaagaagattgaccttccgtacgttgacgtcgtctcgaccgagaaggagatgattaagcgcttcctccgcgtcgtcagggagaaggaccccgacgtgctcatcacctacaacggcgacaacttcgacttcgcctacctgaagaagcgctgtgaggaactcggaataaagttcacactcggcagggacgggagcgagccgaagatacagcgaatgggcgaccgctttgccgttgaggtgaagggcaggattcacttcgacctctaccccgtcataaggcgcacgataaacctcccgacctacacccttgaggccgtttacgaggccgtctttggaaagcccaaggagaaggtttacgcagaggagatagcgcaggcctgggagagcggggagggccttgaaagggttgcaagatactcgatggaggacgctaaggtgacctacgagctgggaagggagttcttcccgatggaggcccagctttcgaggcttataggccagagcctctgggacgtctcgcgctcgagcaccggaaatttggtggaggcattcctcctgcggaaggcctacaagaggaacgagctcgccccaaacaagcccgacgagagggagctcgcgagacggcgcgggggctacgctggcgggtacgttaaggaaccagagcggggattgtgggacaacattgtgtatttagacttccgctcgatgtatccttcaatcatcataacccacaacgtctcgccggataccctcaaccgcgagggctgtaaagagtacgacgtcgcccctgaggttggacacaagttctgcaaggacttccccggcttcataccaagcctcctgggagatttgctcgaggagaggcagaagatagagcggaagatgaaggcaacggttgacccgctggagaagaaactcctcgtgtacaggcagtggcttataaaaatcctcgccaacagcttctacggctactacggctacgccaaggcccggtggtactgcaaggagtgcgccgagagcgttacggcctggggaagggagtatatagaaatggttatccgggaactcgaagaaaaattcggttttaaagttctctatgccgatacagacggtctccatgctaccattcccggagcagacgctgaaacagtcaagaaaaaagcaaaggagttcttaaaatacattaatccaaaactgcccggcctgctcgaacttgagtacgagggcttctacgtgaggggcttcttcgtcacgaagaagaagtacgctgtgatagacgaggagggcaagataaccacgaggggtcttgagattgtgaggcgcgactggagcgagatagcgaaggagacccaggccagggtcttagaggcgatactcaagcacggtgacgtcgaggaggccgttaggatagtcaaggaagtgacggaaaagctgagcaagtatgaggtcccgcccgagaagctggtaatccacgagcagataacgcgcgatttgagggattacaaagccaccggcccgcacgttgccgttgcgaagaggctcgcggcgcgtggagtgaaaatccggcccggcacggtgataagctacatcgtcctaaagggctctggaaggataggcgacagggcgattccagctgatgagttcgacccgacgaagcaccgctacgatgcggaatactacatcgagaaccaggttctcccggcggtggagaggattctaaaagccttcggctatcggaaggaggatttgcgctaccagaagacgaagcaggtcggctcgggcgcgtggctgaaggtgaaggggaagaagggtaccgaagcttacgtagaacaaaaactcatctcagaagaggatctgaatagcgccgtcgaccatcatcatcatcatcattga

SEQ ID NO: 388 - protein, 802 aa, Artificial Sequence
  Description of Artificial Sequence:Thermococcus species 9degreesN-7 mutant DNA polymerase, 9degreesN mutant
MILDTDYITENGKPVIRVFKKENGEFKIEYDRTFEPYFYALLKDDSAIEDVKKVTAKRHGTVVKVKRAEKVQKKFLGRPIEVWKLYFNHPQDVPAIRDRIRAHPAVVDIYEYDIPFAKRYLIDKGLIPMEGDEELTMLAFAIATLYHEGEEFGTGPILMISYADGSEARVITWKKIDLPYVDVVSTEKEMIKRFLRVVREKDPDVLITYNGDNFDFAYLKKRCEELGIKFTLGRDGSEPKIQRMGDRFAVEVKGRIHFDLYPVIRRTINLPTYTLEAVYEAVFGKPKEKVYAEEIAQAWESGEGLERVARYSMEDAKVTYELGREFFPMEAQLSRLIGQSLWDVSRSSTGNLVEAFLLRKAYKRNELAPNKPDERELARRRGGYAGGYVKEPERGLWDNIVYLDFRSMYPSIIITHNVSPDTLNREGCKEYDVAPEVGHKFCKDFPGFIPSLLGDLLEERQKIERKMKATVDPLEKKLLVYRQWLIKILANSFYGYYGYAKARWYCKECAESVTAWGREYIEMVIRELEEKFGFKVLYADTDGLHATIPGADAETVKKKAKEFLKYINPKLPGLLELEYEGFYVRGFFVTKKKYAVIDEEGKITTRGLEIVRRDWSEIAKETQARVLEAILKHGDVEEAVRIVKEVTEKLSKYEVPPEKLVIHEQITRDLRDYKATGPHVAVAKRLAARGVKIRPGTVISYIVLKGSGRIGDRAIPADEFDPTKHRYDAEYYIENQVLPAVERILKAFGYRKEDLRYQKTKQVGSGAWLKVKGKKGTEAYVEQKLISEEDLNSAVDHHHHHH

SEQ ID NO: 389 - DNA, 2409 bp, Artificial Sequence
  Description of Artificial Sequence:Thermococcus species 9degreesN-7 mutant DNA polymerase, 9degreesN mutant
atgattctcgataccgactacatcaccgagaacgggaagcccgtgataagggtcttcaagaaggagaacggcgagtttaaaatcgagtacgacagaaccttcgagccctacttctacgcccttctgaaggacgattctgcgatagaggacgtcaagaaggtaaccgcaaagaggcacggaacggttgtcaaggtgaagcgcgccgagaaggtgcagaagaagttcctcggcaggccgatagaggtctggaagctctacttcaaccatcctcaggacgtcccggcgattcgagacaggatacgcgcccaccccgctgtcgttgacatctacgagtacgacatacccttcgccaagcgctacctcatcgacaagggcctgattccgatggagggcgacgaggagcttacgatgctcgccttcgcgatcgcaaccctctatcacgagggcgaggagttcggaaccgggccgattctcatgataagctacgccgacgggagcgaggcgagggtgataacctggaagaagattgaccttccgtacgttgacgtcgtctcgaccgagaaggagatgattaagcgcttcctccgcgtcgtcagggagaaggaccccgacgtgctcatcacctacaacggcgacaacttcgacttcgcctacctgaagaagcgctgtgaggaactcggaataaagttcacactcggcagggacgggagcgagccgaagatacagcgaatgggcgaccgctttgccgttgaggtgaagggcaggattcacttcgacctctaccccgtcataaggcgcacgataaacctcccgacctacacccttgaggccgtttacgaggccgtctttggaaagcccaaggagaaggtttacgcagaggagatagcgcaggcctgggagagcggggagggccttgaaagggttgcaagatactcgatggaggacgctaaggtgacctacgagctgggaagggagttcttcccgatggaggcccagctttcgaggcttataggccagagcctctgggacgtctcgcgctcgagcaccggaaatttggtggaggcattcctcctgcggaaggcctacaagaggaacgagctcgccccaaacaagcccgacgagagggagctcgcgagacggcgcgggggctacgctggcgggtacgttaaggaaccagagcggggattgtgggacaacattgtgtatttagacttccgctcggcatatccttcaatcatcataacccacaacgtctcgccggataccctcaaccgcgagggctgtaaagagtacgacgtcgcccctgaggttggacacaagttctgcaaggacttccccggcttcataccaagcctcctgggagatttgctcgaggagaggcagaagatagagcggaagatgaaggcaacggttgacccgctggagaagaaactcctcgtgtacaggcagtggcttataaaaatcctcgccaacagcttctacggctactacggctacgccaaggcccggtggtactgcaaggagtgcgccgagagcgttacggcctggggaagggagtatatagaaatggttatccgggaactcgaagaaaaattcggttttaaagttctctatgccgatacagacggtctccatgctaccattcccggagcagacgctgaaacagtcaagaaaaaagcaaaggagttcttaaaatacattaatccaaaactgcccggcctgctcgaacttgagtacgagggcttctacgtgaggggcttcttcgtcacgaagaagaagtacgctgtgatagacgaggagggcaagataaccacgaggggtcttgagattgtgaggcgcgactggagcgagatagcgaaggagacccaggccagggtcttagaggcgatactcaagcacggtgacgtcgaggaggccgttaggatagtcaaggaagtgacggaaaagctgagcaagtatgaggtcccgcccgagaagctggtaatccacgagcagataacgcgcgatttgagggattacaaagccaccggcccgcacgttgccgttgcgaagaggctcgcggcgcgtggagtgaaaatccggcccggcacggtgataagctacatcgtcctaaagggctctggaaggataggcgacagggcgattccagctgatgagttcgacccgacgaagcaccgctacgatgcggaatactacatcgagaaccaggttctcccggcggtggagaggattctaaaagccttcggctatcggaaggaggatttgcgctaccagaagacgaagcaggtcggctcgggcgcgtggctgaaggtgaaggggaagaagggtaccgaagcttacgtagaacaaaaactcatctcagaagaggatctgaatagcgccgtcgaccatcatcatcatcatcattga

SEQ ID NO: 390 - protein, 802 aa, Artificial Sequence
  Description of Artificial Sequence:Thermococcus species 9degreesN-7 mutant DNA polymerase, 9degreesN mutant
MILDTDYITENGKPVIRVFKKENGEFKIEYDRTFEPYFYALLKDDSAIEDVKKVTAKRHGTVVKVKRAEKVQKKFLGRPIEVWKLYFNHPQDVPAIRDRIRAHPAVVDIYEYDIPFAKRYLIDKGLIPMEGDEELTMLAFAIATLYHEGEEFGTGPILMISYADGSEARVITWKKIDLPYVDVVSTEKEMIKRFLRVVREKDPDVLITYNGDNFDFAYLKKRCEELGIKFTLGRDGSEPKIQRMGDRFAVEVKGRIHFDLYPVIRRTINLPTYTLEAVYEAVFGKPKEKVYAEEIAQAWESGEGLERVARYSMEDAKVTYELGREFFPMEAQLSRLIGQSLWDVSRSSTGNLVEAFLLRKAYKRNELAPNKPDERELARRRGGYAGGYVKEPERGLWDNIVYLDFRSAYPSIIITHNVSPDTLNREGCKEYDVAPEVGHKFCKDFPGFIPSLLGDLLEERQKIERKMKATVDPLEKKLLVYRQWLIKILANSFYGYYGYAKARWYCKECAESVTAWGREYIEMVIRELEEKFGFKVLYADTDGLHATIPGADAETVKKKAKEFLKYINPKLPGLLELEYEGFYVRGFFVTKKKYAVIDEEGKITTRGLEIVRRDWSEIAKETQARVLEAILKHGDVEEAVRIVKEVTEKLSKYEVPPEKLVIHEQITRDLRDYKATGPHVAVAKRLAARGVKIRPGTVISYIVLKGSGRIGDRAIPADEFDPTKHRYDAEYYIENQVLPAVERILKAFGYRKEDLRYQKTKQVGSGAWLKVKGKKGTEAYVEQKLISEEDLNSAVDHHHHHH

SEQ ID NO: 391 - DNA, 2409 bp, Artificial Sequence
  Description of Artificial Sequence:Thermococcus species 9degreesN-7 mutant DNA polymerase, 9degreesN mutant
atgattctcgataccgactacatcaccgagaacgggaagcccgtgataagggtcttcaagaaggagaacggcgagtttaaaatcgagtacgacagaaccttcgagccctacttctacgcccttctgaaggacgattctgcgatagaggacgtcaagaaggtaaccgcaaagaggcacggaacggttgtcaaggtgaagcgcgccgagaaggtgcagaagaagttcctcggcaggccgatagaggtctggaagctctacttcaaccatcctcaggacgtcccggcgattcgagacaggatacgcgcccaccccgctgtcgttgacatctacgagtacgacatacccttcgccaagcgctacctcatcgacaagggcctgattccgatggagggcgacgaggagcttacgatgctcgccttcgcgatcgcaaccctctatcacgagggcgaggagttcggaaccgggccgattctcatgataagctacgccgacgggagcgaggcgagggtgataacctggaagaagattgaccttccgtacgttgacgtcgtctcgaccgagaaggagatgattaagcgcttcctccgcgtcgtcagggagaaggaccccgacgtgctcatcacctacaacggcgacaacttcgacttcgcctacctgaagaagcgctgtgaggaactcggaataaagttcacactcggcagggacgggagcgagccgaagatacagcgaatgggcgaccgctttgccgttgaggtgaagggcaggattcacttcgacctctaccccgtcataaggcgcacgataaacctcccgacctacacccttgaggccgtttacgaggccgtctttggaaagcccaaggagaaggtttacgcagaggagatagcgcaggcctgggagagcggggagggccttgaaagggttgcaagatactcgatggaggacgctaaggtgacctacgagctgggaagggagttcttcccgatggaggcccagctttcgaggcttataggccagagcctctgggacgtctcgcgctcgagcaccggaaatttggtggaggcattcctcctgcggaaggcctacaagaggaacgagctcgccccaaacaagcccgacgagagggagctcgcgagacggcgcgggggctacgctggcgggtacgttaaggaaccagagcggggattgtgggacaacattgtgtatttagacttccgctcgaactatccttcaatcatcataacccacaacgtctcgccggataccctcaaccgcgagggctgtaaagagtacgacgtcgcccctgaggttggacacaagttctgcaaggacttccccggcttcataccaagcctcctgggagatttgctcgaggagaggcagaagatagagcggaagatgaaggcaacggttgacccgctggagaagaaactcctcgtgtacaggcagtggcttataaaaatcctcgccaacagcttctacggctactacggctacgccaaggcccggtggtactgcaaggagtgcgccgagagcgttacggcctggggaagggagtatatagaaatggttatccgggaactcgaagaaaaattcggttttaaagttctctatgccgatacagacggtctccatgctaccattcccggagcagacgctgaaacagtcaagaaaaaagcaaaggagttcttaaaatacattaatccaaaactgcccggcctgctcgaacttgagtacgagggcttctacgtgaggggcttcttcgtcacgaagaagaagtacgctgtgatagacgaggagggcaagataaccacgaggggtcttgagattgtgaggcgcgactggagcgagatagcgaaggagacccaggccagggtcttagaggcgatactcaagcacggtgacgtcgaggaggccgttaggatagtcaaggaagtgacggaaaagctgagcaagtatgaggtcccgcccgagaagctggtaatccacgagcagataacgcgcgatttgagggattacaaagccaccggcccgcacgttgccgttgcgaagaggctcgcggcgcgtggagtgaaaatccggcccggcacggtgataagctacatcgtcctaaagggctctggaaggataggcgacagggcgattccagctgatgagttcgacccgacgaagcaccgctacgatgcggaatactacatcgagaaccaggttctcccggcggtggagaggattctaaaagccttcggctatcggaaggaggatttgcgctaccagaagacgaagcaggtcggctcgggcgcgtggctgaaggtgaaggggaagaagggtaccgaagcttacgtagaacaaaaactcatctcagaagaggatctgaatagcgccgtcgaccatcatcatcatcatcattga

SEQ ID NO: 392 - protein, 802 aa, Artificial Sequence
  Description of Artificial Sequence:Thermococcus species 9degreesN-7 mutant DNA polymerase, 9degreesN mutant
MILDTDYITENGKPVIRVFKKENGEFKIEYDRTFEPYFYALLKDDSAIEDVKKVTAKRHGTVVKVKRAEKVQKKFLGRPIEVWKLYFNHPQDVPAIRDRIRAHPAVVDIYEYDIPFAKRYLIDKGLIPMEGDEELTMLAFAIATLYHEGEEFGTGPILMISYADGSEARVITWKKIDLPYVDVVSTEKEMIKRFLRVVREKDPDVLITYNGDNFDFAYLKKRCEELGIKFTLGRDGSEPKIQRMGDRFAVEVKGRIHFDLYPVIRRTINLPTYTLEAVYEAVFGKPKEKVYAEEIAQAWESGEGLERVARYSMEDAKVTYELGREFFPMEAQLSRLIGQSLWDVSRSSTGNLVEAFLLRKAYKRNELAPNKPDERELARRRGGYAGGYVKEPERGLWDNIVYLDFRSNYPSIIITHNVSPDTLNREGCKEYDVAPEVGHKFCKDFPGFIPSLLGDLLEERQKIERKMKATVDPLEKKLLVYRQWLIKILANSFYGYYGYAKARWYCKECAESVTAWGREYIEMVIRELEEKFGFKVLYADTDGLHATIPGADAETVKKKAKEFLKYINPKLPGLLELEYEGFYVRGFFVTKKKYAVIDEEGKITTRGLEIVRRDWSEIAKETQARVLEAILKHGDVEEAVRIVKEVTEKLSKYEVPPEKLVIHEQITRDLRDYKATGPHVAVAKRLAARGVKIRPGTVISYIVLKGSGRIGDRAIPADEFDPTKHRYDAEYYIENQVLPAVERILKAFGYRKEDLRYQKTKQVGSGAWLKVKGKKGTEAYVEQKLISEEDLNSAVDHHHHHH

SEQ ID NO: 393 - DNA, 2409 bp, Artificial Sequence
  Description of Artificial Sequence:Thermococcus species 9degreesN-7 mutant DNA polymerase, 9degreesN mutant
atgattctcgataccgactacatcaccgagaacgggaagcccgtgataagggtcttcaagaaggagaacggcgagtttaaaatcgagtacgacagaaccttcgagccctacttctacgcccttctgaaggacgattctgcgatagaggacgtcaagaaggtaaccgcaaagaggcacggaacggttgtcaaggtgaagcgcgccgagaaggtgcagaagaagttcctcggcaggccgatagaggtctggaagctctacttcaaccatcctcaggacgtcccggcgattcgagacaggatacgcgcccaccccgctgtcgttgacatctacgagtacgacatacccttcgccaagcgctacctcatcgacaagggcctgattccgatggagggcgacgaggagcttacgatgctcgccttcgcgatcgcaaccctctatcacgagggcgaggagttcggaaccgggccgattctcatgataagctacgccgacgggagcgaggcgagggtgataacctggaagaagattgaccttccgtacgttgacgtcgtctcgaccgagaaggagatgattaagcgcttcctccgcgtcgtcagggagaaggaccccgacgtgctcatcacctacaacggcgacaacttcgacttcgcctacctgaagaagcgctgtgaggaactcggaataaagttcacactcggcagggacgggagcgagccgaagatacagcgaatgggcgaccgctttgccgttgaggtgaagggcaggattcacttcgacctctaccccgtcataaggcgcacgataaacctcccgacctacacccttgaggccgtttacgaggccgtctttggaaagcccaaggagaaggtttacgcagaggagatagcgcaggcctgggagagcggggagggccttgaaagggttgcaagatactcgatggaggacgctaaggtgacctacgagctgggaagggagttcttcccgatggaggcccagctttcgaggcttataggccagagcctctgggacgtctcgcgctcgagcaccggaaatttggtggaggcattcctcctgcggaaggcctacaagaggaacgagctcgccccaaacaagcccgacgagagggagctcgcgagacggcgcgggggctacgctggcgggtacgttaaggaaccagagcggggattgtgggacaacattgtgtatttagacttccgctcgaagtatccttcaatcatcataacccacaacgtctcgccggataccctcaaccgcgagggctgtaaagagtacgacgtcgcccctgaggttggacacaagttctgcaaggacttccccggcttcataccaagcctcctgggagatttgctcgaggagaggcagaagatagagcggaagatgaaggcaacggttgacccgctggagaagaaactcctcgtgtacaggcagtggcttataaaaatcctcgccaacagcttctacggctactacggctacgccaaggcccggtggtactgcaaggagtgcgccgagagcgttacggcctggggaagggagtatatagaaatggttatccgggaactcgaagaaaaattcggttttaaagttctctatgccgatacagacggtctccatgctaccattcccggagcagacgctgaaacagtcaagaaaaaagcaaaggagttcttaaaatacattaatccaaaactgcccggcctgctcgaacttgagtacgagggcttctacgtgaggggcttcttcgtcacgaagaagaagtacgctgtgatagacgaggagggcaagataaccacgaggggtcttgagattgtgaggcgcgactggagcgagatagcgaaggagacccaggccagggtcttagaggcgatactcaagcacggtgacgtcgaggaggccgttaggatagtcaaggaagtgacggaaaagctgagcaagtatgaggtcccgcccgagaagctggtaatccacgagcagataacgcgcgatttgagggattacaaagccaccggcccgcacgttgccgttgcgaagaggctcgcggcgcgtggagtgaaaatccggcccggcacggtgataagctacatcgtcctaaagggctctggaaggataggcgacagggcgattccagctgatgagttcgacccgacgaagcaccgctacgatgcggaatactacatcgagaaccaggttctcccggcggtggagaggattctaaaagccttcggctatcggaaggaggatttgcgctaccagaagacgaagcaggtcggctcgggcgcgtggctgaaggtgaaggggaagaagggtaccgaagcttacgtagaacaaaaactcatctcagaagaggatctgaatagcgccgtcgaccatcatcatcatcatcattga

SEQ ID NO: 394 - protein, 802 aa, Artificial Sequence
  Description of Artificial Sequence:Thermococcus species 9degreesN-7 mutant DNA polymerase, 9degreesN mutant
MILDTDYITENGKPVIRVFKKENGEFKIEYDRTFEPYFYALLKDDSAIEDVKKVTAKRHGTVVKVKRAEKVQKKFLGRPIEVWKLYFNHPQDVPAIRDRIRAHPAVVDIYEYDIPFAKRYLIDKGLIPMEGDEELTMLAFAIATLYHEGEEFGTGPILMISYADGSEARVITWKKIDLPYVDVVSTEKEMIKRFLRVVREKDPDVLITYNGDNFDFAYLKKRCEELGIKFTLGRDGSEPKIQRMGDRFAVEVKGRIHFDLYPVIRRTINLPTYTLEAVYEAVFGKPKEKVYAEEIAQAWESGEGLERVARYSMEDAKVTYELGREFFPMEAQLSRLIGQSLWDVSRSSTGNLVEAFLLRKAYKRNELAPNKPDERELARRRGGYAGGYVKEPERGLWDNIVYLDFRSKYPSIIITHNVSPDTLNREGCKEYDVAPEVGHKFCKDFPGFIPSLLGDLLEERQKIERKMKATVDPLEKKLLVYRQWLIKILANSFYGYYGYAKARWYCKECAESVTAWGREYIEMVIRELEEKFGFKVLYADTDGLHATIPGADAETVKKKAKEFLKYINPKLPGLLELEYEGFYVRGFFVTKKKYAVIDEEGKITTRGLEIVRRDWSEIAKETQARVLEAILKHGDVEEAVRIVKEVTEKLSKYEVPPEKLVIHEQITRDLRDYKATGPHVAVAKRLAARGVKIRPGTVISYIVLKGSGRIGDRAIPADEFDPTKHRYDAEYYIENQVLPAVERILKAFGYRKEDLRYQKTKQVGSGAWLKVKGKKGTEAYVEQKLISEEDLNSAVDHHHHHH

SEQ ID NO: 395 - DNA, 2409 bp, Artificial Sequence
  Description of Artificial Sequence:Thermococcus species 9degreesN-7 mutant DNA polymerase, 9degreesN mutant
atgattctcgataccgactacatcaccgagaacgggaagcccgtgataagggtcttcaagaaggagaacggcgagtttaaaatcgagtacgacagaaccttcgagccctacttctacgcccttctgaaggacgattctgcgatagaggacgtcaagaaggtaaccgcaaagaggcacggaacggttgtcaaggtgaagcgcgccgagaaggtgcagaagaagttcctcggcaggccgatagaggtctggaagctctacttcaaccatcctcaggacgtcccggcgattcgagacaggatacgcgcccaccccgctgtcgttgacatctacgagtacgacatacccttcgccaagcgctacctcatcgacaagggcctgattccgatggagggcgacgaggagcttacgatgctcgccttcgcgatcgcaaccctctatcacgagggcgaggagttcggaaccgggccgattctcatgataagctacgccgacgggagcgaggcgagggtgataacctggaagaagattgaccttccgtacgttgacgtcgtctcgaccgagaaggagatgattaagcgcttcctccgcgtcgtcagggagaaggaccccgacgtgctcatcacctacaacggcgacaacttcgacttcgcctacctgaagaagcgctgtgaggaactcggaataaagttcacactcggcagggacgggagcgagccgaagatacagcgaatgggcgaccgctttgccgttgaggtgaagggcaggattcacttcgacctctaccccgtcataaggcgcacgataaacctcccgacctacacccttgaggccgtttacgaggccgtctttggaaagcccaaggagaaggtttacgcagaggagatagcgcaggcctgggagagcggggagggccttgaaagggttgcaagatactcgatggaggacgctaaggtgacctacgagctgggaagggagttcttcccgatggaggcccagctttcgaggcttataggccagagcctctgggacgtctcgcgctcgagcaccggaaatttggtggaggcattcctcctgcggaaggcctacaagaggaacgagctcgccccaaacaagcccgacgagagggagctcgcgagacggcgcgggggctacgctggcgggtacgttaaggaaccagagcggggattgtgggacaacattgtgtatttagacttccgctcgtattatccttcaatcatcataacccacaacgtctcgccggataccctcaaccgcgagggctgtaaagagtacgacgtcgcccctgaggttggacacaagttctgcaaggacttccccggcttcataccaagcctcctgggagatttgctcgaggagaggcagaagatagagcggaagatgaaggcaacggttgacccgctggagaagaaactcctcgtgtacaggcagtggcttataaaaatcctcgccaacagcttctacggctactacggctacgccaaggcccggtggtactgcaaggagtgcgccgagagcgttacggcctggggaagggagtatatagaaatggttatccgggaactcgaagaaaaattcggttttaaagttctctatgccgatacagacggtctccatgctaccattcccggagcagacgctgaaacagtcaagaaaaaagcaaaggagttcttaaaatacattaatccaaaactgcccggcctgctcgaacttgagtacgagggcttctacgtgaggggcttcttcgtcacgaagaagaagtacgctgtgatagacgaggagggcaagataaccacgaggggtcttgagattgtgaggcgcgactggagcgagatagcgaaggagacccaggccagggtcttagaggcgatactcaagcacggtgacgtcgaggaggccgttaggatagtcaaggaagtgacggaaaagctgagcaagtatgaggtcccgcccgagaagctggtaatccacgagcagataacgcgcgatttgagggattacaaagccaccggcccgcacgttgccgttgcgaagaggctcgcggcgcgtggagtgaaaatccggcccggcacggtgataagctacatcgtcctaaagggctctggaaggataggcgacagggcgattccagctgatgagttcgacccgacgaagcaccgctacgatgcggaatactacatcgagaaccaggttctcccggcggtggagaggattctaaaagccttcggctatcggaaggaggatttgcgctaccagaagacgaagcaggtcggctcgggcgcgtggctgaaggtgaaggggaagaagggtaccgaagcttacgtagaacaaaaactcatctcagaagaggatctgaatagcgccgtcgaccatcatcatcatcatcattga

SEQ ID NO: 396 - protein, 802 aa, Artificial Sequence
  Description of Artificial Sequence:Thermococcus species 9degreesN-7 mutant DNA polymerase, 9degreesN mutant
MILDTDYITENGKPVIRVFKKENGEFKIEYDRTFEPYFYALLKDDSAIEDVKKVTAKRHGTVVKVKRAEKVQKKFLGRPIEVWKLYFNHPQDVPAIRDRIRAHPAVVDIYEYDIPFAKRYLIDKGLIPMEGDEELTMLAFAIATLYHEGEEFGTGPILMISYADGSEARVITWKKIDLPYVDVVSTEKEMIKRFLRVVREKDPDVLITYNGDNFDFAYLKKRCEELGIKFTLGRDGSEPKIQRMGDRFAVEVKGRIHFDLYPVIRRTINLPTYTLEAVYEAVFGKPKEKVYAEEIAQAWESGEGLERVARYSMEDAKVTYELGREFFPMEAQLSRLIGQSLWDVSRSSTGNLVEAFLLRKAYKRNELAPNKPDERELARRRGGYAGGYVKEPERGLWDNIVYLDFRSYYPSIIITHNVSPDTLNREGCKEYDVAPEVGHKFCKDFPGFIPSLLGDLLEERQKIERKMKATVDPLEKKLLVYRQWLIKILANSFYGYYGYAKARWYCKECAESVTAWGREYIEMVIRELEEKFGFKVLYADTDGLHATIPGADAETVKKKAKEFLKYINPKLPGLLELEYEGFYVRGFFVTKKKYAVIDEEGKITTRGLEIVRRDWSEIAKETQARVLEAILKHGDVEEAVRIVKEVTEKLSKYEVPPEKLVIHEQITRDLRDYKATGPHVAVAKRLAARGVKIRPGTVISYIVLKGSGRIGDRAIPADEFDPTKHRYDAEYYIENQVLPAVERILKAFGYRKEDLRYQKTKQVGSGAWLKVKGKKGTEAYVEQKLISEEDLNSAVDHHHHHH

SEQ ID NO: 397 - DNA, 2409 bp, Artificial Sequence
  Description of Artificial Sequence:Thermococcus species 9degreesN-7 mutant DNA polymerase, 9degreesN mutant
atgattctcgataccgactacatcaccgagaacgggaagcccgtgataagggtcttcaagaaggagaacggcgagtttaaaatcgagtacgacagaaccttcgagccctacttctacgcccttctgaaggacgattctgcgatagaggacgtcaagaaggtaaccgcaaagaggcacggaacggttgtcaaggtgaagcgcgccgagaaggtgcagaagaagttcctcggcaggccgatagaggtctggaagctctacttcaaccatcctcaggacgtcccggcgattcgagacaggatacgcgcccaccccgctgtcgttgacatctacgagtacgacatacccttcgccaagcgctacctcatcgacaagggcctgattccgatggagggcgacgaggagcttacgatgctcgccttcgcgatcgcaaccctctatcacgagggcgaggagttcggaaccgggccgattctcatgataagctacgccgacgggagcgaggcgagggtgataacctggaagaagattgaccttccgtacgttgacgtcgtctcgaccgagaaggagatgattaagcgcttcctccgcgtcgtcagggagaaggaccccgacgtgctcatcacctacaacggcgacaacttcgacttcgcctacctgaagaagcgctgtgaggaactcggaataaagttcacactcggcagggacgggagcgagccgaagatacagcgaatgggcgaccgctttgccgttgaggtgaagggcaggattcacttcgacctctaccccgtcataaggcgcacgataaacctcccgacctacacccttgaggccgtttacgaggccgtctttggaaagcccaaggagaaggtttacgcagaggagatagcgcaggcctgggagagcggggagggccttgaaagggttgcaagatactcgatggaggacgctaaggtgacctacgagctgggaagggagttcttcccgatggaggcccagctttcgaggcttataggccagagcctctgggacgtctcgcgctcgagcaccggaaatttggtggaggcattcctcctgcggaaggcctacaagaggaacgagctcgccccaaacaagcccgacgagagggagctcgcgagacggcgcgggggctacgctggcgggtacgttaaggaaccagagcggggattgtgggacaacattgtgtatttagacttccgctcgtgctatccttcaatcatcataacccacaacgtctcgccggataccctcaaccgcgagggctgtaaagagtacgacgtcgcccctgaggttggacacaagttctgcaaggacttccccggcttcataccaagcctcctgggagatttgctcgaggagaggcagaagatagagcggaagatgaaggcaacggttgacccgctggagaagaaactcctcgtgtacaggcagtggcttataaaaatcctcgccaacagcttctacggctactacggctacgccaaggcccggtggtactgcaaggagtgcgccgagagcgttacggcctggggaagggagtatatagaaatggttatccgggaactcgaagaaaaattcggttttaaagttctctatgccgatacagacggtctccatgctaccattcccggagcagacgctgaaacagtcaagaaaaaagcaaaggagttcttaaaatacattaatccaaaactgcccggcctgctcgaacttgagtacgagggcttctacgtgaggggcttcttcgtcacgaagaagaagtacgctgtgatagacgaggagggcaagataaccacgaggggtcttgagattgtgaggcgcgactggagcgagatagcgaaggagacccaggccagggtcttagaggcgatactcaagcacggtgacgtcgaggaggccgttaggatagtcaaggaagtgacggaaaagctgagcaagtatgaggtcccgcccgagaagctggtaatccacgagcagataacgcgcgatttgagggattacaaagccaccggcccgcacgttgccgttgcgaagaggctcgcggcgcgtggagtgaaaatccggcccggcacggtgataagctacatcgtcctaaagggctctggaaggataggcgacagggcgattccagctgatgagttcgacccgacgaagcaccgctacgatgcggaatactacatcgagaaccaggttctcccggcggtggagaggattctaaaagccttcggctatcggaaggaggatttgcgctaccagaagacgaagcaggtcggctcgggcgcgtggctgaaggtgaaggggaagaagggtaccgaagcttacgtagaacaaaaactcatctcagaagaggatctgaatagcgccgtcgaccatcatcatcatcatcattga

SEQ ID NO: 398 - protein, 802 aa, Artificial Sequence
  Description of Artificial Sequence:Thermococcus species 9degreesN-7 mutant DNA polymerase, 9degreesN mutant
MILDTDYITENGKPVIRVFKKENGEFKIEYDRTFEPYFYALLKDDSAIEDVKKVTAKRHGTVVKVKRAEKVQKKFLGRPIEVWKLYFNHPQDVPAIRDRIRAHPAVVDIYEYDIPFAKRYLIDKGLIPMEGDEELTMLAFAIATLYHEGEEFGTGPILMISYADGSEARVITWKKIDLPYVDVVSTEKEMIKRFLRVVREKDPDVLITYNGDNFDFAYLKKRCEELGIKFTLGRDGSEPKIQRMGDRFAVEVKGRIHFDLYPVIRRTINLPTYTLEAVYEAVFGKPKEKVYAEEIAQAWESGEGLERVARYSMEDAKVTYELGREFFPMEAQLSRLIGQSLWDVSRSSTGNLVEAFLLRKAYKRNELAPNKPDERELARRRGGYAGGYVKEPERGLWDNIVYLDFRSCYPSIIITHNVSPDTLNREGCKEYDVAPEVGHKFCKDFPGFIPSLLGDLLEERQKIERKMKATVDPLEKKLLVYRQWLIKILANSFYGYYGYAKARWYCKECAESVTAWGREYIEMVIRELEEKFGFKVLYADTDGLHATIPGADAETVKKKAKEFLKYINPKLPGLLELEYEGFYVRGFFVTKKKYAVIDEEGKITTRGLEIVRRDWSEIAKETQARVLEAILKHGDVEEAVRIVKEVTEKLSKYEVPPEKLVIHEQITRDLRDYKATGPHVAVAKRLAARGVKIRPGTVISYIVLKGSGRIGDRAIPADEFDPTKHRYDAEYYIENQVLPAVERILKAFGYRKEDLRYQKTKQVGSGAWLKVKGKKGTEAYVEQKLISEEDLNSAVDHHHHHH

SEQ ID NO: 399 - DNA, 2409 bp, Artificial Sequence
  Description of Artificial Sequence:Thermococcus species 9degreesN-7 mutant DNA polymerase, 9degreesN mutant
atgattctcgataccgactacatcaccgagaacgggaagcccgtgataagggtcttcaagaaggagaacggcgagtttaaaatcgagtacgacagaaccttcgagccctacttctacgcccttctgaaggacgattctgcgatagaggacgtcaagaaggtaaccgcaaagaggcacggaacggttgtcaaggtgaagcgcgccgagaaggtgcagaagaagttcctcggcaggccgatagaggtctggaagctctacttcaaccatcctcaggacgtcccggcgattcgagacaggatacgcgcccaccccgctgtcgttgacatctacgagtacgacatacccttcgccaagcgctacctcatcgacaagggcctgattccgatggagggcgacgaggagcttacgatgctcgccttcgcgatcgcaaccctctatcacgagggcgaggagttcggaaccgggccgattctcatgataagctacgccgacgggagcgaggcgagggtgataacctggaagaagattgaccttccgtacgttgacgtcgtctcgaccgagaaggagatgattaagcgcttcctccgcgtcgtcagggagaaggaccccgacgtgctcatcacctacaacggcgacaacttcgacttcgcctacctgaagaagcgctgtgaggaactcggaataaagttcacactcggcagggacgggagcgagccgaagatacagcgaatgggcgaccgctttgccgttgaggtgaagggcaggattcacttcgacctctaccccgtcataaggcgcacgataaacctcccgacctacacccttgaggccgtttacgaggccgtctttggaaagcccaaggagaaggtttacgcagaggagatagcgcaggcctgggagagcggggagggccttgaaagggttgcaagatactcgatggaggacgctaaggtgacctacgagctgggaagggagttcttcccgatggaggcccagctttcgaggcttataggccagagcctctgggacgtctcgcgctcgagcaccggaaatttggtggaggcattcctcctgcggaaggcctacaagaggaacgagctcgccccaaacaagcccgacgagagggagctcgcgagacggcgcgggggctacgctggcgggtacgttaaggaaccagagcggggattgtgggacaacattgtgtatttagacttccgctcgcaatatccttcaatcatcataacccacaacgtctcgccggataccctcaaccgcgagggctgtaaagagtacgacgtcgcccctgaggttggacacaagttctgcaaggacttccccggcttcataccaagcctcctgggagatttgctcgaggagaggcagaagatagagcggaagatgaaggcaacggttgacccgctggagaagaaactcctcgtgtacaggcagtggcttataaaaatcctcgccaacagcttctacggctactacggctacgccaaggcccggtggtactgcaaggagtgcgccgagagcgttacggcctggggaagggagtatatagaaatggttatccgggaactcgaagaaaaattcggttttaaagttctctatgccgatacagacggtctccatgctaccattcccggagcagacgctgaaacagtcaagaaaaaagcaaaggagttcttaaaatacattaatccaaaactgcccggcctgctcgaacttgagtacgagggcttctacgtgaggggcttcttcgtcacgaagaagaagtacgctgtgatagacgaggagggcaagataaccacgaggggtcttgagattgtgaggcgcgactggagcgagatagcgaaggagacccaggccagggtcttagaggcgatactcaagcacggtgacgtcgaggaggccgttaggatagtcaaggaagtgacggaaaagctgagcaagtatgaggtcccgcccgagaagctggtaatccacgagcagataacgcgcgatttgagggattacaaagccaccggcccgcacgttgccgttgcgaagaggctcgcggcgcgtggagtgaaaatccggcccggcacggtgataagctacatcgtcctaaagggctctggaaggataggcgacagggcgattccagctgatgagttcgacccgacgaagcaccgctacgatgcggaatactacatcgagaaccaggttctcccggcggtggagaggattctaaaagccttcggctatcggaaggaggatttgcgctaccagaagacgaagcaggtcggctcgggcgcgtggctgaaggtgaaggggaagaagggtaccgaagcttacgtagaacaaaaactcatctcagaagaggatctgaatagcgccgtcgaccatcatcatcatcatcattga

SEQ ID NO: 400 - protein, 802 aa, Artificial Sequence
  Description of Artificial Sequence:Thermococcus species 9degreesN-7 mutant DNA polymerase, 9degreesN mutant
MILDTDYITENGKPVIRVFKKENGEFKIEYDRTFEPYFYALLKDDSAIEDVKKVTAKRHGTVVKVKRAEKVQKKFLGRPIEVWKLYFNHPQDVPAIRDRIRAHPAVVDIYEYDIPFAKRYLIDKGLIPMEGDEELTMLAFAIATLYHEGEEFGTGPILMISYADGSEARVITWKKIDLPYVDVVSTEKEMIKRFLRVVREKDPDVLITYNGDNFDFAYLKKRCEELGIKFTLGRDGSEPKIQRMGDRFAVEVKGRIHFDLYPVIRRTINLPTYTLEAVYEAVFGKPKEKVYAEEIAQAWESGEGLERVARYSMEDAKVTYELGREFFPMEAQLSRLIGQSLWDVSRSSTGNLVEAFLLRKAYKRNELAPNKPDERELARRRGGYAGGYVKEPERGLWDNIVYLDFRSQYPSIIITHNVSPDTLNREGCKEYDVAPEVGHKFCKDFPGFIPSLLGDLLEERQKIERKMKATVDPLEKKLLVYRQWLIKILANSFYGYYGYAKARWYCKECAESVTAWGREYIEMVIRELEEKFGFKVLYADTDGLHATIPGADAETVKKKAKEFLKYINPKLPGLLELEYEGFYVRGFFVTKKKYAVIDEEGKITTRGLEIVRRDWSEIAKETQARVLEAILKHGDVEEAVRIVKEVTEKLSKYEVPPEKLVIHEQITRDLRDYKATGPHVAVAKRLAARGVKIRPGTVISYIVLKGSGRIGDRAIPADEFDPTKHRYDAEYYIENQVLPAVERILKAFGYRKEDLRYQKTKQVGSGAWLKVKGKKGTEAYVEQKLISEEDLNSAVDHHHHHH

SEQ ID NO: 401 - DNA, 2409 bp, Artificial Sequence
  Description of Artificial Sequence:Thermococcus species 9degreesN-7 mutant DNA polymerase, 9degreesN mutant
atgattctcgataccgactacatcaccgagaacgggaagcccgtgataagggtcttcaagaaggagaacggcgagtttaaaatcgagtacgacagaaccttcgagccctacttctacgcccttctgaaggacgattctgcgatagaggacgtcaagaaggtaaccgcaaagaggcacggaacggttgtcaaggtgaagcgcgccgagaaggtgcagaagaagttcctcggcaggccgatagaggtctggaagctctacttcaaccatcctcaggacgtcccggcgattcgagacaggatacgcgcccaccccgctgtcgttgacatctacgagtacgacatacccttcgccaagcgctacctcatcgacaagggcctgattccgatggagggcgacgaggagcttacgatgctcgccttcgcgatcgcaaccctctatcacgagggcgaggagttcggaaccgggccgattctcatgataagctacgccgacgggagcgaggcgagggtgataacctggaagaagattgaccttccgtacgttgacgtcgtctcgaccgagaaggagatgattaagcgcttcctccgcgtcgtcagggagaaggaccccgacgtgctcatcacctacaacggcgacaacttcgacttcgcctacctgaagaagcgctgtgaggaactcggaataaagttcacactcggcagggacgggagcgagccgaagatacagcgaatgggcgaccgctttgccgttgaggtgaagggcaggattcacttcgacctctaccccgtcataaggcgcacgataaacctcccgacctacacccttgaggccgtttacgaggccgtctttggaaagcccaaggagaaggtttacgcagaggagatagcgcaggcctgggagagcggggagggccttgaaagggttgcaagatactcgatggaggacgctaaggtgacctacgagctgggaagggagttcttcccgatggaggcccagctttcgaggcttataggccagagcctctgggacgtctcgcgctcgagcaccggaaatttggtggaggcattcctcctgcggaaggcctacaagaggaacgagctcgccccaaacaagcccgacgagagggagctcgcgagacggcgcgggggctacgctggcgggtacgttaaggaaccagagcggggattgtgggacaacattgtgtatttagacttccgctcgctgtatccttcaatcatcataacccacaacgtctcgccggataccctcaaccgcgagggctgtaaagagtacgacgtcgcccctgaggttggacacaagttctgcaaggacttccccggcttcataccaagctacctgggagatttgctcgaggagaggcagaagatagagcggaagatgaaggcaacggttgacccgctggagaagaaactcctcgtgtacaggcagtggcttataaaaatcctcgccaacagcttctacggctactacggctacgccaaggcccggtggtactgcaaggagtgcgccgagagcgttacggcctggggaagggagtatatagaaatggttatccgggaactcgaagaaaaattcggttttaaagttctctatgccgatacagacggtctccatgctaccattcccggagcagacgctgaaacagtcaagaaaaaagcaaaggagttcttaaaatacattaatccaaaactgcccggcctgctcgaacttgagtacgagggcttctacgtgaggggcttcttcgtcacgaagaagaagtacgctgtgatagacgaggagggcaagataaccacgaggggtcttgagattgtgaggcgcgactggagcgagatagcgaaggagacccaggccagggtcttagaggcgatactcaagcacggtgacgtcgaggaggccgttaggatagtcaaggaagtgacggaaaagctgagcaagtatgaggtcccgcccgagaagctggtaatccacgagcagataacgcgcgatttgagggattacaaagccaccggcccgcacgttgccgttgcgaagaggctcgcggcgcgtggagtgaaaatccggcccggcacggtgataagctacatcgtcctaaagggctctggaaggataggcgacagggcgattccagctgatgagttcgacccgacgaagcaccgctacgatgcggaatactacatcgagaaccaggttctcccggcggtggagaggattctaaaagccttcggctatcggaaggaggatttgcgctaccagaagacgaagcaggtcggctcgggcgcgtggctgaaggtgaaggggaagaagggtaccgaagcttacgtagaacaaaaactcatctcagaagaggatctgaatagcgccgtcgaccatcatcatcatcatcattga

SEQ ID NO: 402 - protein, 802 aa, Artificial Sequence
  Description of Artificial Sequence:Thermococcus species 9degreesN-7 mutant DNA polymerase, 9degreesN mutant
MILDTDYITENGKPVIRVFKKENGEFKIEYDRTFEPYFYALLKDDSAIEDVKKVTAKRHGTVVKVKRAEKVQKKFLGRPIEVWKLYFNHPQDVPAIRDRIRAHPAVVDIYEYDIPFAKRYLIDKGLIPMEGDEELTMLAFAIATLYHEGEEFGTGPILMISYADGSEARVITWKKIDLPYVDVVSTEKEMIKRFLRVVREKDPDVLITYNGDNFDFAYLKKRCEELGIKFTLGRDGSEPKIQRMGDRFAVEVKGRIHFDLYPVIRRTINLPTYTLEAVYEAVFGKPKEKVYAEEIAQAWESGEGLERVARYSMEDAKVTYELGREFFPMEAQLSRLIGQSLWDVSRSSTGNLVEAFLLRKAYKRNELAPNKPDERELARRRGGYAGGYVKEPERGLWDNIVYLDFRSLYPSIIITHNVSPDTLNREGCKEYDVAPEVGHKFCKDFPGFIPSYLGDLLEERQKIERKMKATVDPLEKKLLVYRQWLIKILANSFYGYYGYAKARWYCKECAESVTAWGREYIEMVIRELEEKFGFKVLYADTDGLHATIPGADAETVKKKAKEFLKYINPKLPGLLELEYEGFYVRGFFVTKKKYAVIDEEGKITTRGLEIVRRDWSEIAKETQARVLEAILKHGDVEEAVRIVKEVTEKLSKYEVPPEKLVIHEQITRDLRDYKATGPHVAVAKRLAARGVKIRPGTVISYIVLKGSGRIGDRAIPADEFDPTKHRYDAEYYIENQVLPAVERILKAFGYRKEDLRYQKTKQVGSGAWLKVKGKKGTEAYVEQKLISEEDLNSAVDHHHHHH

SEQ ID NO: 403 - DNA, 2409 bp, Artificial Sequence
  Description of Artificial Sequence:Thermococcus species 9degreesN-7 mutant DNA polymerase, 9degreesN mutant
atgattctcgataccgactacatcaccgagaacgggaagcccgtgataagggtcttcaagaaggagaacggcgagtttaaaatcgagtacgacagaaccttcgagccctacttctacgcccttctgaaggacgattctgcgatagaggacgtcaagaaggtaaccgcaaagaggcacggaacggttgtcaaggtgaagcgcgccgagaaggtgcagaagaagttcctcggcaggccgatagaggtctggaagctctacttcaaccatcctcaggacgtcccggcgattcgagacaggatacgcgcccaccccgctgtcgttgacatctacgagtacgacatacccttcgccaagcgctacctcatcgacaagggcctgattccgatggagggcgacgaggagcttacgatgctcgccttcgcgatcgcaaccctctatcacgagggcgaggagttcggaaccgggccgattctcatgataagctacgccgacgggagcgaggcgagggtgataacctggaagaagattgaccttccgtacgttgacgtcgtctcgaccgagaaggagatgattaagcgcttcctccgcgtcgtcagggagaaggaccccgacgtgctcatcacctacaacggcgacaacttcgacttcgcctacctgaagaagcgctgtgaggaactcggaataaagttcacactcggcagggacgggagcgagccgaagatacagcgaatgggcgaccgctttgccgttgaggtgaagggcaggattcacttcgacctctaccccgtcataaggcgcacgataaacctcccgacctacacccttgaggccgtttacgaggccgtctttggaaagcccaaggagaaggtttacgcagaggagatagcgcaggcctgggagagcggggagggccttgaaagggttgcaagatactcgatggaggacgctaaggtgacctacgagctgggaagggagttcttcccgatggaggcccagctttcgaggcttataggccagagcctctgggacgtctcgcgctcgagcaccggaaatttggtggaggcattcctcctgcggaaggcctacaagaggaacgagctcgccccaaacaagcccgacgagagggagctcgcgagacggcgcgggggctacgctggcgggtacgttaaggaaccagagcggggattgtgggacaacattgtgtatttagacttccgctcgctgtatccttcaatcatcataacccacaacgtctcgccggataccctcaaccgcgagggctgtaaagagtacgacgtcgcccctgaggttggacacaagttctgcaaggacttcttgggcttcataccaagcctcctgggagatttgctcgaggagaggcagaagatagagcggaagatgaaggcaacggttgacccgctggagaagaaactcctcgtgtacaggcagtggcttataaaaatcctcgccaacagcttctacggctactacggctacgccaaggcccggtggtactgcaaggagtgcgccgagagcgttacggcctggggaagggagtatatagaaatggttatccgggaactcgaagaaaaattcggttttaaagttctctatgccgatacagacggtctccatgctaccattcccggagcagacgctgaaacagtcaagaaaaaagcaaaggagttcttaaaatacattaatccaaaactgcccggcctgctcgaacttgagtacgagggcttctacgtgaggggcttcttcgtcacgaagaagaagtacgctgtgatagacgaggagggcaagataaccacgaggggtcttgagattgtgaggcgcgactggagcgagatagcgaaggagacccaggccagggtcttagaggcgatactcaagcacggtgacgtcgaggaggccgttaggatagtcaaggaagtgacggaaaagctgagcaagtatgaggtcccgcccgagaagctggtaatccacgagcagataacgcgcgatttgagggattacaaagccaccggcccgcacgttgccgttgcgaagaggctcgcggcgcgtggagtgaaaatccggcccggcacggtgataagctacatcgtcctaaagggctctggaaggataggcgacagggcgattccagctgatgagttcgacccgacgaagcaccgctacgatgcggaatactacatcgagaaccaggttctcccggcggtggagaggattctaaaagccttcggctatcggaaggaggatttgcgctaccagaagacgaagcaggtcggctcgggcgcgtggctgaaggtgaaggggaagaagggtaccgaagcttacgtagaacaaaaactcatctcagaagaggatctgaatagcgccgtcgaccatcatcatcatcatcattga

SEQ ID NO: 404 - protein, 802 aa, Artificial Sequence
  Description of Artificial Sequence:Thermococcus species 9degreesN-7 mutant DNA polymerase, 9degreesN mutant
MILDTDYITENGKPVIRVFKKENGEFKIEYDRTFEPYFYALLKDDSAIEDVKKVTAKRHGTVVKVKRAEKVQKKFLGRPIEVWKLYFNHPQDVPAIRDRIRAHPAVVDIYEYDIPFAKRYLIDKGLIPMEGDEELTMLAFAIATLYHEGEEFGTGPILMISYADGSEARVITWKKIDLPYVDVVSTEKEMIKRFLRVVREKDPDVLITYNGDNFDFAYLKKRCEELGIKFTLGRDGSEPKIQRMGDRFAVEVKGRIHFDLYPVIRRTINLPTYTLEAVYEAVFGKPKEKVYAEEIAQAWESGEGLERVARYSMEDAKVTYELGREFFPMEAQLSRLIGQSLWDVSRSSTGNLVEAFLLRKAYKRNELAPNKPDERELARRRGGYAGGYVKEPERGLWDNIVYLDFRSLYPSIIITHNVSPDTLNREGCKEYDVAPEVGHKFCKDFLGFIPSLLGDLLEERQKIERKMKATVDPLEKKLLVYRQWLIKILANSFYGYYGYAKARWYCKECAESVTAWGREYIEMVIRELEEKFGFKVLYADTDGLHATIPGADAETVKKKAKEFLKYINPKLPGLLELEYEGFYVRGFFVTKKKYAVIDEEGKITTRGLEIVRRDWSEIAKETQARVLEAILKHGDVEEAVRIVKEVTEKLSKYEVPPEKLVIHEQITRDLRDYKATGPHVAVAKRLAARGVKIRPGTVISYIVLKGSGRIGDRAIPADEFDPTKHRYDAEYYIENQVLPAVERILKAFGYRKEDLRYQKTKQVGSGAWLKVKGKKGTEAYVEQKLISEEDLNSAVDHHHHHH

SEQ ID NO: 405 - DNA, 2409 bp, Artificial Sequence
  Description of Artificial Sequence:Thermococcus species 9degreesN-7 mutant DNA polymerase, 9degreesN mutant
atgattctcgataccgactacatcaccgagaacgggaagcccgtgataagggtcttcaagaaggagaacggcgagtttaaaatcgagtacgacagaaccttcgagccctacttctacgcccttctgaaggacgattctgcgatagaggacgtcaagaaggtaaccgcaaagaggcacggaacggttgtcaaggtgaagcgcgccgagaaggtgcagaagaagttcctcggcaggccgatagaggtctggaagctctacttcaaccatcctcaggacgtcccggcgattcgagacaggatacgcgcccaccccgctgtcgttgacatctacgagtacgacatacccttcgccaagcgctacctcatcgacaagggcctgattccgatggagggcgacgaggagcttacgatgctcgccttcgcgatcgcaaccctctatcacgagggcgaggagttcggaaccgggccgattctcatgataagctacgccgacgggagcgaggcgagggtgataacctggaagaagattgaccttccgtacgttgacgtcgtctcgaccgagaaggagatgattaagcgcttcctccgcgtcgtcagggagaaggaccccgacgtgctcatcacctacaacggcgacaacttcgacttcgcctacctgaagaagcgctgtgaggaactcggaataaagttcacactcggcagggacgggagcgagccgaagatacagcgaatgggcgaccgctttgccgttgaggtgaagggcaggattcacttcgacctctaccccgtcataaggcgcacgataaacctcccgacctacacccttgaggccgtttacgaggccgtctttggaaagcccaaggagaaggtttacgcagaggagatagcgcaggcctgggagagcggggagggccttgaaagggttgcaagatactcgatggaggacgctaaggtgacctacgagctgggaagggagttcttcccgatggaggcccagctttcgaggcttataggccagagcctctgggacgtctcgcgctcgagcaccggaaatttggtggaggcattcctcctgcggaaggcctacaagaggaacgagctcgccccaaacaagcccgacgagagggagctcgcgagacggcgcgggggctacgctggcgggtacgttaaggaaccagagcggggattgtgggacaacattgtgtatttagacttccgctcgctgtatccttcaatcatcataacccacaacgtctcgccggataccctcaaccgcgagggctgtaaagagtacgacgtcgcccctgaggttggacacaagttctgcaaggacttcaacggcttcataccaagcctcctgggagatttgctcgaggagaggcagaagatagagcggaagatgaaggcaacggttgacccgctggagaagaaactcctcgtgtacaggcagtggcttataaaaatcctcgccaacagcttctacggctactacggctacgccaaggcccggtggtactgcaaggagtgcgccgagagcgttacggcctggggaagggagtatatagaaatggttatccgggaactcgaagaaaaattcggttttaaagttctctatgccgatacagacggtctccatgctaccattcccggagcagacgctgaaacagtcaagaaaaaagcaaaggagttcttaaaatacattaatccaaaactgcccggcctgctcgaacttgagtacgagggcttctacgtgaggggcttcttcgtcacgaagaagaagtacgctgtgatagacgaggagggcaagataaccacgaggggtcttgagattgtgaggcgcgactggagcgagatagcgaaggagacccaggccagggtcttagaggcgatactcaagcacggtgacgtcgaggaggccgttaggatagtcaaggaagtgacggaaaagctgagcaagtatgaggtcccgcccgagaagctggtaatccacgagcagataacgcgcgatttgagggattacaaagccaccggcccgcacgttgccgttgcgaagaggctcgcggcgcgtggagtgaaaatccggcccggcacggtgataagctacatcgtcctaaagggctctggaaggataggcgacagggcgattccagctgatgagttcgacccgacgaagcaccgctacgatgcggaatactacatcgagaaccaggttctcccggcggtggagaggattctaaaagccttcggctatcggaaggaggatttgcgctaccagaagacgaagcaggtcggctcgggcgcgtggctgaaggtgaaggggaagaagggtaccgaagcttacgtagaacaaaaactcatctcagaagaggatctgaatagcgccgtcgaccatcatcatcatcatcattga

SEQ ID NO: 406 - protein, 802 aa, Artificial Sequence
  Description of Artificial Sequence:Thermococcus species 9degreesN-7 mutant DNA polymerase, 9degreesN mutant
MILDTDYITENGKPVIRVFKKENGEFKIEYDRTFEPYFYALLKDDSAIEDVKKVTAKRHGTVVKVKRAEKVQKKFLGRPIEVWKLYFNHPQDVPAIRDRIRAHPAVVDIYEYDIPFAKRYLIDKGLIPMEGDEELTMLAFAIATLYHEGEEFGTGPILMISYADGSEARVITWKKIDLPYVDVVSTEKEMIKRFLRVVREKDPDVLITYNGDNFDFAYLKKRCEELGIKFTLGRDGSEPKIQRMGDRFAVEVKGRIHFDLYPVIRRTINLPTYTLEAVYEAVFGKPKEKVYAEEIAQAWESGEGLERVARYSMEDAKVTYELGREFFPMEAQLSRLIGQSLWDVSRSSTGNLVEAFLLRKAYKRNELAPNKPDERELARRRGGYAGGYVKEPERGLWDNIVYLDFRSLYPSIIITHNVSPDTLNREGCKEYDVAPEVGHKFCKDFNGFIPSLLGDLLEERQKIERKMKATVDPLEKKLLVYRQWLIKILANSFYGYYGYAKARWYCKECAESVTAWGREYIEMVIRELEEKFGFKVLYADTDGLHATIPGADAETVKKKAKEFLKYINPKLPGLLELEYEGFYVRGFFVTKKKYAVIDEEGKITTRGLEIVRRDWSEIAKETQARVLEAILKHGDVEEAVRIVKEVTEKLSKYEVPPEKLVIHEQITRDLRDYKATGPHVAVAKRLAARGVKIRPGTVISYIVLKGSGRIGDRAIPADEFDPTKHRYDAEYYIENQVLPAVERILKAFGYRKEDLRYQKTKQVGSGAWLKVKGKKGTEAYVEQKLISEEDLNSAVDHHHHHH

SEQ ID NO: 407 - DNA, 2409 bp, Artificial Sequence
  Description of Artificial Sequence:Thermococcus species 9degreesN-7 mutant DNA polymerase, 9degreesN mutant
atgattctcgataccgactacatcaccgagaacgggaagcccgtgataagggtcttcaagaaggagaacggcgagtttaaaatcgagtacgacagaaccttcgagccctacttctacgcccttctgaaggacgattctgcgatagaggacgtcaagaaggtaaccgcaaagaggcacggaacggttgtcaaggtgaagcgcgccgagaaggtgcagaagaagttcctcggcaggccgatagaggtctggaagctctacttcaaccatcctcaggacgtcccggcgattcgagacaggatacgcgcccaccccgctgtcgttgacatctacgagtacgacatacccttcgccaagcgctacctcatcgacaagggcctgattccgatggagggcgacgaggagcttacgatgctcgccttcgcgatcgcaaccctctatcacgagggcgaggagttcggaaccgggccgattctcatgataagctacgccgacgggagcgaggcgagggtgataacctggaagaagattgaccttccgtacgttgacgtcgtctcgaccgagaaggagatgattaagcgcttcctccgcgtcgtcagggagaaggaccccgacgtgctcatcacctacaacggcgacaacttcgacttcgcctacctgaagaagcgctgtgaggaactcggaataaagttcacactcggcagggacgggagcgagccgaagatacagcgaatgggcgaccgctttgccgttgaggtgaagggcaggattcacttcgacctctaccccgtcataaggcgcacgataaacctcccgacctacacccttgaggccgtttacgaggccgtctttggaaagcccaaggagaaggtttacgcagaggagatagcgcaggcctgggagagcggggagggccttgaaagggttgcaagatactcgatggaggacgctaaggtgacctacgagctgggaagggagttcttcccgatggaggcccagctttcgaggcttataggccagagcctctgggacgtctcgcgctcgagcaccggaaatttggtggaggcattcctcctgcggaaggcctacaagaggaacgagctcgccccaaacaagcccgacgagagggagctcgcgagacggcgcgggggctacgctggcgggtacgttaaggaaccagagcggggattgtgggacaacattgtgtatttagacttccgctcgctgtatccttcaatcatcataacccacaacgtctcgccggataccctcaaccgcgagggctgtaaagagtacgacgtcgcccctgaggttggacacaagttctgcaaggacttccccggcttcataccaagcctcctgggagatttgctcgaggagaggtacaagatagagcggaagatgaaggcaacggttgacccgctggagaagaaactcctcgtgtacaggcagtggcttataaaaatcctcgccaacagcttctacggctactacggctacgccaaggcccggtggtactgcaaggagtgcgccgagagcgttacggcctggggaagggagtatatagaaatggttatccgggaactcgaagaaaaattcggttttaaagttctctatgccgatacagacggtctccatgctaccattcccggagcagacgctgaaacagtcaagaaaaaagcaaaggagttcttaaaatacattaatccaaaactgcccggcctgctcgaacttgagtacgagggcttctacgtgaggggcttcttcgtcacgaagaagaagtacgctgtgatagacgaggagggcaagataaccacgaggggtcttgagattgtgaggcgcgactggagcgagatagcgaaggagacccaggccagggtcttagaggcgatactcaagcacggtgacgtcgaggaggccgttaggatagtcaaggaagtgacggaaaagctgagcaagtatgaggtcccgcccgagaagctggtaatccacgagcagataacgcgcgatttgagggattacaaagccaccggcccgcacgttgccgttgcgaagaggctcgcggcgcgtggagtgaaaatccggcccggcacggtgataagctacatcgtcctaaagggctctggaaggataggcgacagggcgattccagctgatgagttcgacccgacgaagcaccgctacgatgcggaatactacatcgagaaccaggttctcccggcggtggagaggattctaaaagccttcggctatcggaaggaggatttgcgctaccagaagacgaagcaggtcggctcgggcgcgtggctgaaggtgaaggggaagaagggtaccgaagcttacgtagaacaaaaactcatctcagaagaggatctgaatagcgccgtcgaccatcatcatcatcatcattga

SEQ ID NO: 408 - protein, 802 aa, Artificial Sequence
  Description of Artificial Sequence:Thermococcus species 9degreesN-7 mutant DNA polymerase, 9degreesN mutant
MILDTDYITENGKPVIRVFKKENGEFKIEYDRTFEPYFYALLKDDSAIEDVKKVTAKRHGTVVKVKRAEKVQKKFLGRPIEVWKLYFNHPQDVPAIRDRIRAHPAVVDIYEYDIPFAKRYLIDKGLIPMEGDEELTMLAFAIATLYHEGEEFGTGPILMISYADGSEARVITWKKIDLPYVDVVSTEKEMIKRFLRVVREKDPDVLITYNGDNFDFAYLKKRCEELGIKFTLGRDGSEPKIQRMGDRFAVEVKGRIHFDLYPVIRRTINLPTYTLEAVYEAVFGKPKEKVYAEEIAQAWESGEGLERVARYSMEDAKVTYELGREFFPMEAQLSRLIGQSLWDVSRSSTGNLVEAFLLRKAYKRNELAPNKPDERELARRRGGYAGGYVKEPERGLWDNIVYLDFRSLYPSIIITHNVSPDTLNREGCKEYDVAPEVGHKFCKDFPGFIPSLLGDLLEERYKIERKMKATVDPLEKKLLVYRQWLIKILANSFYGYYGYAKARWYCKECAESVTAWGREYIEMVIRELEEKFGFKVLYADTDGLHATIPGADAETVKKKAKEFLKYINPKLPGLLELEYEGFYVRGFFVTKKKYAVIDEEGKITTRGLEIVRRDWSEIAKETQARVLEAILKHGDVEEAVRIVKEVTEKLSKYEVPPEKLVIHEQITRDLRDYKATGPHVAVAKRLAARGVKIRPGTVISYIVLKGSGRIGDRAIPADEFDPTKHRYDAEYYIENQVLPAVERILKAFGYRKEDLRYQKTKQVGSGAWLKVKGKKGTEAYVEQKLISEEDLNSAVDHHHHHH

SEQ ID NO: 409 - DNA, 2409 bp, Artificial Sequence
  Description of Artificial Sequence:Thermococcus species 9degreesN-7 mutant DNA polymerase, 9degreesN mutant
atgattctcgataccgactacatcaccgagaacgggaagcccgtgataagggtcttcaagaaggagaacggcgagtttaaaatcgagtacgacagaaccttcgagccctacttctacgcccttctgaaggacgattctgcgatagaggacgtcaagaaggtaaccgcaaagaggcacggaacggttgtcaaggtgaagcgcgccgagaaggtgcagaagaagttcctcggcaggccgatagaggtctggaagctctacttcaaccatcctcaggacgtcccggcgattcgagacaggatacgcgcccaccccgctgtcgttgacatctacgagtacgacatacccttcgccaagcgctacctcatcgacaagggcctgattccgatggagggcgacgaggagcttacgatgctcgccttcgcgatcgcaaccctctatcacgagggcgaggagttcggaaccgggccgattctcatgataagctacgccgacgggagcgaggcgagggtgataacctggaagaagattgaccttccgtacgttgacgtcgtctcgaccgagaaggagatgattaagcgcttcctccgcgtcgtcagggagaaggaccccgacgtgctcatcacctacaacggcgacaacttcgacttcgcctacctgaagaagcgctgtgaggaactcggaataaagttcacactcggcagggacgggagcgagccgaagatacagcgaatgggcgaccgctttgccgttgaggtgaagggcaggattcacttcgacctctaccccgtcataaggcgcacgataaacctcccgacctacacccttgaggccgtttacgaggccgtctttggaaagcccaaggagaaggtttacgcagaggagatagcgcaggcctgggagagcggggagggccttgaaagggttgcaagatactcgatggaggacgctaaggtgacctacgagctgggaagggagttcttcccgatggaggcccagctttcgaggcttataggccagagcctctgggacgtctcgcgctcgagcaccggaaatttggtggaggcattcctcctgcggaaggcctacaagaggaacgagctcgccccaaacaagcccgacgagagggagctcgcgagacggcgcgggggctacgctggcgggtacgttaaggaaccagagcggggattgtgggacaacattgtgtatttagacttccgctcgctgtatccttcaatcatcataacccacaacgtctcgccggataccctcaaccgcgagggctgtaaagagtacgacgtcgcccctgaggttggacacaagttctgcaaggacttccccggcttcataccaagcctcctgggagatttgctcgaggagaggcagaagatagagcggaagatgaaggcaacgacagacccgctggagaagaaactcctcgtgtacaggcagtggcttataaaaatcctcgccaacagcttctacggctactacggctacgccaaggcccggtggtactgcaaggagtgcgccgagagcgttacggcctggggaagggagtatatagaaatggttatccgggaactcgaagaaaaattcggttttaaagttctctatgccgatacagacggtctccatgctaccattcccggagcagacgctgaaacagtcaagaaaaaagcaaaggagttcttaaaatacattaatccaaaactgcccggcctgctcgaacttgagtacgagggcttctacgtgaggggcttcttcgtcacgaagaagaagtacgctgtgatagacgaggagggcaagataaccacgaggggtcttgagattgtgaggcgcgactggagcgagatagcgaaggagacccaggccagggtcttagaggcgatactcaagcacggtgacgtcgaggaggccgttaggatagtcaaggaagtgacggaaaagctgagcaagtatgaggtcccgcccgagaagctggtaatccacgagcagataacgcgcgatttgagggattacaaagccaccggcccgcacgttgccgttgcgaagaggctcgcggcgcgtggagtgaaaatccggcccggcacggtgataagctacatcgtcctaaagggctctggaaggataggcgacagggcgattccagctgatgagttcgacccgacgaagcaccgctacgatgcggaatactacatcgagaaccaggttctcccggcggtggagaggattctaaaagccttcggctatcggaaggaggatttgcgctaccagaagacgaagcaggtcggctcgggcgcgtggctgaaggtgaaggggaagaagggtaccgaagcttacgtagaacaaaaactcatctcagaagaggatctgaatagcgccgtcgaccatcatcatcatcatcattga

SEQ ID NO: 410 - protein, 802 aa, Artificial Sequence
  Description of Artificial Sequence:Thermococcus species 9degreesN-7 mutant DNA polymerase, 9degreesN mutant
MILDTDYITENGKPVIRVFKKENGEFKIEYDRTFEPYFYALLKDDSAIEDVKKVTAKRHGTVVKVKRAEKVQKKFLGRPIEVWKLYFNHPQDVPAIRDRIRAHPAVVDIYEYDIPFAKRYLIDKGLIPMEGDEELTMLAFAIATLYHEGEEFGTGPILMISYADGSEARVITWKKIDLPYVDVVSTEKEMIKRFLRVVREKDPDVLITYNGDNFDFAYLKKRCEELGIKFTLGRDGSEPKIQRMGDRFAVEVKGRIHFDLYPVIRRTINLPTYTLEAVYEAVFGKPKEKVYAEEIAQAWESGEGLERVARYSMEDAKVTYELGREFFPMEAQLSRLIGQSLWDVSRSSTGNLVEAFLLRKAYKRNELAPNKPDERELARRRGGYAGGYVKEPERGLWDNIVYLDFRSLYPSIIITHNVSPDTLNREGCKEYDVAPEVGHKFCKDFPGFIPSLLGDLLEERQKIERKMKATTDPLEKKLLVYRQWLIKILANSFYGYYGYAKARWYCKECAESVTAWGREYIEMVIRELEEKFGFKVLYADTDGLHATIPGADAETVKKKAKEFLKYINPKLPGLLELEYEGFYVRGFFVTKKKYAVIDEEGKITTRGLEIVRRDWSEIAKETQARVLEAILKHGDVEEAVRIVKEVTEKLSKYEVPPEKLVIHEQITRDLRDYKATGPHVAVAKRLAARGVKIRPGTVISYIVLKGSGRIGDRAIPADEFDPTKHRYDAEYYIENQVLPAVERILKAFGYRKEDLRYQKTKQVGSGAWLKVKGKKGTEAYVEQKLISEEDLNSAVDHHHHHH

SEQ ID NO: 411 - DNA, 2409 bp, Artificial Sequence
  Description of Artificial Sequence:Thermococcus species 9degreesN-7 mutant DNA polymerase, 9degreesN mutant
atgattctcgataccgactacatcaccgagaacgggaagcccgtgataagggtcttcaagaaggagaacggcgagtttaaaatcgagtacgacagaaccttcgagccctacttctacgcccttctgaaggacgattctgcgatagaggacgtcaagaaggtaaccgcaaagaggcacggaacggttgtcaaggtgaagcgcgccgagaaggtgcagaagaagttcctcggcaggccgatagaggtctggaagctctacttcaaccatcctcaggacgtcccggcgattcgagacaggatacgcgcccaccccgctgtcgttgacatctacgagtacgacatacccttcgccaagcgctacctcatcgacaagggcctgattccgatggagggcgacgaggagcttacgatgctcgccttcgcgatcgcaaccctctatcacgagggcgaggagttcggaaccgggccgattctcatgataagctacgccgacgggagcgaggcgagggtgataacctggaagaagattgaccttccgtacgttgacgtcgtctcgaccgagaaggagatgattaagcgcttcctccgcgtcgtcagggagaaggaccccgacgtgctcatcacctacaacggcgacaacttcgacttcgcctacctgaagaagcgctgtgaggaactcggaataaagttcacactcggcagggacgggagcgagccgaagatacagcgaatgggcgaccgctttgccgttgaggtgaagggcaggattcacttcgacctctaccccgtcataaggcgcacgataaacctcccgacctacacccttgaggccgtttacgaggccgtctttggaaagcccaaggagaaggtttacgcagaggagatagcgcaggcctgggagagcggggagggccttgaaagggttgcaagatactcgatggaggacgctaaggtgacctacgagctgggaagggagttcttcccgatggaggcccagctttcgaggcttataggccagagcctctgggacgtctcgcgctcgagcaccggaaatttggtggaggcattcctcctgcggaaggcctacaagaggaacgagctcgccccaaacaagcccgacgagagggagctcgcgagacggcgcgggggctacgctggcgggtacgttaaggaaccagagcggggattgtgggacaacattgtgtatttagacttccgctcgctgtatccttcaatcatcataacccacaacgtctcgccggataccctcaaccgcgagggctgtaaagagtacgacgtcgcccctgaggttggacacaagttctgcaaggacttccccggcttcataccaagcctcctgggagatttgctcgaggagaggcagaagatagagcggaagatgaaggcaacggttgacccgctggagaagaaactcctcgtgtacaggcagtggcttataaaaatcctcgccaacagcttctacggccattacggctacgccaaggcccggtggtactgcaaggagtgcgccgagagcgttacggcctggggaagggagtatatagaaatggttatccgggaactcgaagaaaaattcggttttaaagttctctatgccgatacagacggtctccatgctaccattcccggagcagacgctgaaacagtcaagaaaaaagcaaaggagttcttaaaatacattaatccaaaactgcccggcctgctcgaacttgagtacgagggcttctacgtgaggggcttcttcgtcacgaagaagaagtacgctgtgatagacgaggagggcaagataaccacgaggggtcttgagattgtgaggcgcgactggagcgagatagcgaaggagacccaggccagggtcttagaggcgatactcaagcacggtgacgtcgaggaggccgttaggatagtcaaggaagtgacggaaaagctgagcaagtatgaggtcccgcccgagaagctggtaatccacgagcagataacgcgcgatttgagggattacaaagccaccggcccgcacgttgccgttgcgaagaggctcgcggcgcgtggagtgaaaatccggcccggcacggtgataagctacatcgtcctaaagggctctggaaggataggcgacagggcgattccagctgatgagttcgacccgacgaagcaccgctacgatgcggaatactacatcgagaaccaggttctcccggcggtggagaggattctaaaagccttcggctatcggaaggaggatttgcgctaccagaagacgaagcaggtcggctcgggcgcgtggctgaaggtgaaggggaagaagggtaccgaagcttacgtagaacaaaaactcatctcagaagaggatctgaatagcgccgtcgaccatcatcatcatcatcattga

SEQ ID NO: 412 - protein, 802 aa, Artificial Sequence
  Description of Artificial Sequence:Thermococcus species 9degreesN-7 mutant DNA polymerase, 9degreesN mutant
MILDTDYITENGKPVIRVFKKENGEFKIEYDRTFEPYFYALLKDDSAIEDVKKVTAKRHGTVVKVKRAEKVQKKFLGRPIEVWKLYFNHPQDVPAIRDRIRAHPAVVDIYEYDIPFAKRYLIDKGLIPMEGDEELTMLAFAIATLYHEGEEFGTGPILMISYADGSEARVITWKKIDLPYVDVVSTEKEMIKRFLRVVREKDPDVLITYNGDNFDFAYLKKRCEELGIKFTLGRDGSEPKIQRMGDRFAVEVKGRIHFDLYPVIRRTINLPTYTLEAVYEAVFGKPKEKVYAEEIAQAWESGEGLERVARYSMEDAKVTYELGREFFPMEAQLSRLIGQSLWDVSRSSTGNLVEAFLLRKAYKRNELAPNKPDERELARRRGGYAGGYVKEPERGLWDNIVYLDFRSLYPSIIITHNVSPDTLNREGCKEYDVAPEVGHKFCKDFPGFIPSLLGDLLEERQKIERKMKATVDPLEKKLLVYRQWLIKILANSFYGHYGYAKARWYCKECAESVTAWGREYIEMVIRELEEKFGFKVLYADTDGLHATIPGADAETVKKKAKEFLKYINPKLPGLLELEYEGFYVRGFFVTKKKYAVIDEEGKITTRGLEIVRRDWSEIAKETQARVLEAILKHGDVEEAVRIVKEVTEKLSKYEVPPEKLVIHEQITRDLRDYKATGPHVAVAKRLAARGVKIRPGTVISYIVLKGSGRIGDRAIPADEFDPTKHRYDAEYYIENQVLPAVERILKAFGYRKEDLRYQKTKQVGSGAWLKVKGKKGTEAYVEQKLISEEDLNSAVDHHHHHH

SEQ ID NO: 413 - DNA, 2409 bp, Artificial Sequence
  Description of Artificial Sequence:Thermococcus species 9degreesN-7 mutant DNA polymerase, 9degreesN mutant
atgattctcgataccgactacatcaccgagaacgggaagcccgtgataagggtcttcaagaaggagaacggcgagtttaaaatcgagtacgacagaaccttcgagccctacttctacgcccttctgaaggacgattctgcgatagaggacgtcaagaaggtaaccgcaaagaggcacggaacggttgtcaaggtgaagcgcgccgagaaggtgcagaagaagttcctcggcaggccgatagaggtctggaagctctacttcaaccatcctcaggacgtcccggcgattcgagacaggatacgcgcccaccccgctgtcgttgacatctacgagtacgacatacccttcgccaagcgctacctcatcgacaagggcctgattccgatggagggcgacgaggagcttacgatgctcgccttcgcgatcgcaaccctctatcacgagggcgaggagttcggaaccgggccgattctcatgataagctacgccgacgggagcgaggcgagggtgataacctggaagaagattgaccttccgtacgttgacgtcgtctcgaccgagaaggagatgattaagcgcttcctccgcgtcgtcagggagaaggaccccgacgtgctcatcacctacaacggcgacaacttcgacttcgcctacctgaagaagcgctgtgaggaactcggaataaagttcacactcggcagggacgggagcgagccgaagatacagcgaatgggcgaccgctttgccgttgaggtgaagggcaggattcacttcgacctctaccccgtcataaggcgcacgataaacctcccgacctacacccttgaggccgtttacgaggccgtctttggaaagcccaaggagaaggtttacgcagaggagatagcgcaggcctgggagagcggggagggccttgaaagggttgcaagatactcgatggaggacgctaaggtgacctacgagctgggaagggagttcttcccgatggaggcccagctttcgaggcttataggccagagcctctgggacgtctcgcgctcgagcaccggaaatttggtggagtggttcctcctgcggaaggcctacaagaggaacgagctcgccccaaacaagcccgacgagagggagctcgcgagacggcgcgggggctacgctggcgggtacgttaaggaaccagagcggggattgtgggacaacattgtgtatttagacttccgctcgtggtatccttcaatcatcataacccacaacgtctcgccggataccctcaaccgcgagggctgtaaagagtacgacgtcgcccctgaggttggacacaagttctgcaaggacttccccggcttcataccaagcctcctgggagatttgctcgaggagaggcagaagatagagcggaagatgaaggcaacggttgacccgctggagaagaaactcctcgattacaggatgtggcttataaaaatcctcgccaacagcgtgtacggctactacggctacgccaaggcccggtggtactgcaaggagtgcgccgagagcgttacggcctggggaagggagtatatagaaatggttatccgggaactcgaagaaaaattcggttttaaagttctctatgccgatacagacggtctccatgctaccattcccggagcagacgctgaaacagtcaagaaaaaagcaaaggagttcttaaaatacattaatccaaaactgcccggcctgctcgaacttgagtacgagggcttctacgtgaggggcttcttcgtcacgaagaagaagtacgctgtgatagacgaggagggcaagataaccacgaggggtcttgagattgtgaggcgcgactggagcgagatagcgaaggagacccaggccagggtcttagaggcgatactcaagcacggtgacgtcgaggaggccgttaggatagtcaaggaagtgacggaaaagctgagcaagtatgaggtcccgcccgagaagctggtaatccacgagcagataacgcgcgatttgagggattacaaagccaccggcccgcacgttgccgttgcgaagaggctcgcggcgcgtggagtgaaaatccggcccggcacggtgataagctacatcgtcctaaagggctctggaaggataggcgacagggcgattccagctgatgagttcgacccgacgaagcaccgctacgatgcggaatactacatcgagaaccaggttctcccggcggtggagaggattctaaaagccttcggctatcggaaggaggatttgcgctaccagaagacgaagcaggtcggctcgggcgcgtggctgaaggtgaaggggaagaagggtaccgaagcttacgtagaacaaaaactcatctcagaagaggatctgaatagcgccgtcgaccatcatcatcatcatcattga

SEQ ID NO: 414 - protein, 802 aa, Artificial Sequence
  Description of Artificial Sequence:Thermococcus species 9degreesN-7 mutant DNA polymerase, 9degreesN mutant
MILDTDYITENGKPVIRVFKKENGEFKIEYDRTFEPYFYALLKDDSAIEDVKKVTAKRHGTVVKVKRAEKVQKKFLGRPIEVWKLYFNHPQDVPAIRDRIRAHPAVVDIYEYDIPFAKRYLIDKGLIPMEGDEELTMLAFAIATLYHEGEEFGTGPILMISYADGSEARVITWKKIDLPYVDVVSTEKEMIKRFLRVVREKDPDVLITYNGDNFDFAYLKKRCEELGIKFTLGRDGSEPKIQRMGDRFAVEVKGRIHFDLYPVIRRTINLPTYTLEAVYEAVFGKPKEKVYAEEIAQAWESGEGLERVARYSMEDAKVTYELGREFFPMEAQLSRLIGQSLWDVSRSSTGNLVEWFLLRKAYKRNELAPNKPDERELARRRGGYAGGYVKEPERGLWDNIVYLDFRSWYPSIIITHNVSPDTLNREGCKEYDVAPEVGHKFCKDFPGFIPSLLGDLLEERQKIERKMKATVDPLEKKLLDYRMWLIKILANSVYGYYGYAKARWYCKECAESVTAWGREYIEMVIRELEEKFGFKVLYADTDGLHATIPGADAETVKKKAKEFLKYINPKLPGLLELEYEGFYVRGFFVTKKKYAVIDEEGKITTRGLEIVRRDWSEIAKETQARVLEAILKHGDVEEAVRIVKEVTEKLSKYEVPPEKLVIHEQITRDLRDYKATGPHVAVAKRLAARGVKIRPGTVISYIVLKGSGRIGDRAIPADEFDPTKHRYDAEYYIENQVLPAVERILKAFGYRKEDLRYQKTKQVGSGAWLKVKGKKGTEAYVEQKLISEEDLNSAVDHHHHHH

SEQ ID NO: 415 - DNA, 2409 bp, Artificial Sequence
  Description of Artificial Sequence:Thermococcus species 9degreesN-7 mutant DNA polymerase, 9degreesN mutant
atgattctcgataccgactacatcaccgagaacgggaagcccgtgataagggtcttcaagaaggagaacggcgagtttaaaatcgagtacgacagaaccttcgagccctacttctacgcccttctgaaggacgattctgcgatagaggacgtcaagaaggtaaccgcaaagaggcacggaacggttgtcaaggtgaagcgcgccgagaaggtgcagaagaagttcctcggcaggccgatagaggtctggaagctctacttcaaccatcctcaggacgtcccggcgattcgagacaggatacgcgcccaccccgctgtcgttgacatctacgagtacgacatacccttcgccaagcgctacctcatcgacaagggcctgattccgatggagggcgacgaggagcttacgatgctcgccttcgcgatcgcaaccctctatcacgagggcgaggagttcggaaccgggccgattctcatgataagctacgccgacgggagcgaggcgagggtgataacctggaagaagattgaccttccgtacgttgacgtcgtctcgaccgagaaggagatgattaagcgcttcctccgcgtcgtcagggagaaggaccccgacgtgctcatcacctacaacggcgacaacttcgacttcgcctacctgaagaagcgctgtgaggaactcggaataaagttcacactcggcagggacgggagcgagccgaagatacagcgaatgggcgaccgctttgccgttgaggtgaagggcaggattcacttcgacctctaccccgtcataaggcgcacgataaacctcccgacctacacccttgaggccgtttacgaggccgtctttggaaagcccaaggagaaggtttacgcagaggagatagcgcaggcctgggagagcggggagggccttgaaagggttgcaagatactcgatggaggacgctaaggtgacctacgagctgggaagggagttcttcccgatggaggcccagctttcgaggcttataggccagagcctctgggacgtctcgcgctcgagcaccggaaatttggtggagtggttcctcctgcggaaggcctacaagaggaacgagctcgccccaaacaagcccgacgagagggagctcgcgagacggcgcgggggctacgctggcgggtacgttaaggaaccagagcggggattgtgggacaacattgtgtatttagacttccgctcgtggtatccttcaatcatcataacccacaacgtctcgccggataccctcaaccgcgagggctgtaaagagtacgacgtcgcccctgaggttggacacaagttctgcaaggacttccccggcttcataccaagcctcctgggagatttgctcgaggagaggcagaagatagagcggaagatgaaggcaacggttgacccgctggagaagaaactcctcgattacaggatgtggcttataaaaatcctcgccaacagcatctacggctactacggctacgccaaggcccggtggtactgcaaggagtgcgccgagagcgttacggcctggggaagggagtatatagaaatggttatccgggaactcgaagaaaaattcggttttaaagttctctatgccgatacagacggtctccatgctaccattcccggagcagacgctgaaacagtcaagaaaaaagcaaaggagttcttaaaatacattaatccaaaactgcccggcctgctcgaacttgagtacgagggcttctacgtgaggggcttcttcgtcacgaagaagaagtacgctgtgatagacgaggagggcaagataaccacgaggggtcttgagattgtgaggcgcgactggagcgagatagcgaaggagacccaggccagggtcttagaggcgatactcaagcacggtgacgtcgaggaggccgttaggatagtcaaggaagtgacggaaaagctgagcaagtatgaggtcccgcccgagaagctggtaatccacgagcagataacgcgcgatttgagggattacaaagccaccggcccgcacgttgccgttgcgaagaggctcgcggcgcgtggagtgaaaatccggcccggcacggtgataagctacatcgtcctaaagggctctggaaggataggcgacagggcgattccagctgatgagttcgacccgacgaagcaccgctacgatgcggaatactacatcgagaaccaggttctcccggcggtggagaggattctaaaagccttcggctatcggaaggaggatttgcgctaccagaagacgaagcaggtcggctcgggcgcgtggctgaaggtgaaggggaagaagggtaccgaagcttacgtagaacaaaaactcatctcagaagaggatctgaatagcgccgtcgaccatcatcatcatcatcattga

SEQ ID NO: 416 - protein, 802 aa, Artificial Sequence
  Description of Artificial Sequence:Thermococcus species 9degreesN-7 mutant DNA polymerase, 9degreesN mutant
MILDTDYITENGKPVIRVFKKENGEFKIEYDRTFEPYFYALLKDDSAIEDVKKVTAKRHGTVVKVKRAEKVQKKFLGRPIEVWKLYFNHPQDVPAIRDRIRAHPAVVDIYEYDIPFAKRYLIDKGLIPMEGDEELTMLAFAIATLYHEGEEFGTGPILMISYADGSEARVITWKKIDLPYVDVVSTEKEMIKRFLRVVREKDPDVLITYNGDNFDFAYLKKRCEELGIKFTLGRDGSEPKIQRMGDRFAVEVKGRIHFDLYPVIRRTINLPTYTLEAVYEAVFGKPKEKVYAEEIAQAWESGEGLERVARYSMEDAKVTYELGREFFPMEAQLSRLIGQSLWDVSRSSTGNLVEWFLLRKAYKRNELAPNKPDERELARRRGGYAGGYVKEPERGLWDNIVYLDFRSWYPSIIITHNVSPDTLNREGCKEYDVAPEVGHKFCKDFPGFIPSLLGDLLEERQKIERKMKATVDPLEKKLLDYRMWLIKILANSIYGYYGYAKARWYCKECAESVTAWGREYIEMVIRELEEKFGFKVLYADTDGLHATIPGADAETVKKKAKEFLKYINPKLPGLLELEYEGFYVRGFFVTKKKYAVIDEEGKITTRGLEIVRRDWSEIAKETQARVLEAILKHGDVEEAVRIVKEVTEKLSKYEVPPEKLVIHEQITRDLRDYKATGPHVAVAKRLAARGVKIRPGTVISYIVLKGSGRIGDRAIPADEFDPTKHRYDAEYYIENQVLPAVERILKAFGYRKEDLRYQKTKQVGSGAWLKVKGKKGTEAYVEQKLISEEDLNSAVDHHHHHH

SEQ ID NO: 417 - DNA, 2409 bp, Artificial Sequence
  Description of Artificial Sequence:Thermococcus species 9degreesN-7 mutant DNA polymerase, 9degreesN mutant
atgattctcgataccgactacatcaccgagaacgggaagcccgtgataagggtcttcaagaaggagaacggcgagtttaaaatcgagtacgacagaaccttcgagccctacttctacgcccttctgaaggacgattctgcgatagaggacgtcaagaaggtaaccgcaaagaggcacggaacggttgtcaaggtgaagcgcgccgagaaggtgcagaagaagttcctcggcaggccgatagaggtctggaagctctacttcaaccatcctcaggacgtcccggcgattcgagacaggatacgcgcccaccccgctgtcgttgacatctacgagtacgacatacccttcgccaagcgctacctcatcgacaagggcctgattccgatggagggcgacgaggagcttacgatgctcgccttcgcgatcgcaaccctctatcacgagggcgaggagttcggaaccgggccgattctcatgataagctacgccgacgggagcgaggcgagggtgataacctggaagaagattgaccttccgtacgttgacgtcgtctcgaccgagaaggagatgattaagcgcttcctccgcgtcgtcagggagaaggaccccgacgtgctcatcacctacaacggcgacaacttcgacttcgcctacctgaagaagcgctgtgaggaactcggaataaagttcacactcggcagggacgggagcgagccgaagatacagcgaatgggcgaccgctttgccgttgaggtgaagggcaggattcacttcgacctctaccccgtcataaggcgcacgataaacctcccgacctacacccttgaggccgtttacgaggccgtctttggaaagcccaaggagaaggtttacgcagaggagatagcgcaggcctgggagagcggggagggccttgaaagggttgcaagatactcgatggaggacgctaaggtgacctacgagctgggaagggagttcttcccgatggaggcccagctttcgaggcttataggccagagcctctgggacgtctcgcgctcgagcaccggaaatttggtggagtggttcctcctgcggaaggcctacaagaggaacgagctcgccccaaacaagcccgacgagagggagctcgcgagacggcgcgggggctacgctggcgggtacgttaaggaaccagagcggggattgtgggacaacattgtgtatttagacttccgctcgtggtatccttcaatcatcataacccacaacgtctcgccggataccctcaaccgcgagggctgtaaagagtacgacgtcgcccctgaggttggacacaagttctgcaaggacttccccggcttcataccaagcctcctgggagatttgctcgaggagaggcagaagatagagcggaagatgaaggcaacggttgacccgctggagaagaaactcctcgattacaggatgtggcttataaaaatcctcgccaacagccactacggctactacggctacgccaaggcccggtggtactgcaaggagtgcgccgagagcgttacggcctggggaagggagtatatagaaatggttatccgggaactcgaagaaaaattcggttttaaagttctctatgccgatacagacggtctccatgctaccattcccggagcagacgctgaaacagtcaagaaaaaagcaaaggagttcttaaaatacattaatccaaaactgcccggcctgctcgaacttgagtacgagggcttctacgtgaggggcttcttcgtcacgaagaagaagtacgctgtgatagacgaggagggcaagataaccacgaggggtcttgagattgtgaggcgcgactggagcgagatagcgaaggagacccaggccagggtcttagaggcgatactcaagcacggtgacgtcgaggaggccgttaggatagtcaaggaagtgacggaaaagctgagcaagtatgaggtcccgcccgagaagctggtaatccacgagcagataacgcgcgatttgagggattacaaagccaccggcccgcacgttgccgttgcgaagaggctcgcggcgcgtggagtgaaaatccggcccggcacggtgataagctacatcgtcctaaagggctctggaaggataggcgacagggcgattccagctgatgagttcgacccgacgaagcaccgctacgatgcggaatactacatcgagaaccaggttctcccggcggtggagaggattctaaaagccttcggctatcggaaggaggatttgcgctaccagaagacgaagcaggtcggctcgggcgcgtggctgaaggtgaaggggaagaagggtaccgaagcttacgtagaacaaaaactcatctcagaagaggatctgaatagcgccgtcgaccatcatcatcatcatcattga

SEQ ID NO: 418 - protein, 802 aa, Artificial Sequence
  Description of Artificial Sequence:Thermococcus species 9degreesN-7 mutant DNA polymerase, 9degreesN mutant
MILDTDYITENGKPVIRVFKKENGEFKIEYDRTFEPYFYALLKDDSAIEDVKKVTAKRHGTVVKVKRAEKVQKKFLGRPIEVWKLYFNHPQDVPAIRDRIRAHPAVVDIYEYDIPFAKRYLIDKGLIPMEGDEELTMLAFAIATLYHEGEEFGTGPILMISYADGSEARVITWKKIDLPYVDVVSTEKEMIKRFLRVVREKDPDVLITYNGDNFDFAYLKKRCEELGIKFTLGRDGSEPKIQRMGDRFAVEVKGRIHFDLYPVIRRTINLPTYTLEAVYEAVFGKPKEKVYAEEIAQAWESGEGLERVARYSMEDAKVTYELGREFFPMEAQLSRLIGQSLWDVSRSSTGNLVEWFLLRKAYKRNELAPNKPDERELARRRGGYAGGYVKEPERGLWDNIVYLDFRSWYPSIIITHNVSPDTLNREGCKEYDVAPEVGHKFCKDFPGFIPSLLGDLLEERQKIERKMKATVDPLEKKLLDYRMWLIKILANSHYGYYGYAKARWYCKECAESVTAWGREYIEMVIRELEEKFGFKVLYADTDGLHATIPGADAETVKKKAKEFLKYINPKLPGLLELEYEGFYVRGFFVTKKKYAVIDEEGKITTRGLEIVRRDWSEIAKETQARVLEAILKHGDVEEAVRIVKEVTEKLSKYEVPPEKLVIHEQITRDLRDYKATGPHVAVAKRLAARGVKIRPGTVISYIVLKGSGRIGDRAIPADEFDPTKHRYDAEYYIENQVLPAVERILKAFGYRKEDLRYQKTKQVGSGAWLKVKGKKGTEAYVEQKLISEEDLNSAVDHHHHHH

SEQ ID NO: 419 - DNA, 2409 bp, Artificial Sequence
  Description of Artificial Sequence:Thermococcus species 9degreesN-7 mutant DNA polymerase, 9degreesN mutant
atgattctcgataccgactacatcaccgagaacgggaagcccgtgataagggtcttcaagaaggagaacggcgagtttaaaatcgagtacgacagaaccttcgagccctacttctacgcccttctgaaggacgattctgcgatagaggacgtcaagaaggtaaccgcaaagaggcacggaacggttgtcaaggtgaagcgcgccgagaaggtgcagaagaagttcctcggcaggccgatagaggtctggaagctctacttcaaccatcctcaggacgtcccggcgattcgagacaggatacgcgcccaccccgctgtcgttgacatctacgagtacgacatacccttcgccaagcgctacctcatcgacaagggcctgattccgatggagggcgacgaggagcttacgatgctcgccttcgcgatcgcaaccctctatcacgagggcgaggagttcggaaccgggccgattctcatgataagctacgccgacgggagcgaggcgagggtgataacctggaagaagattgaccttccgtacgttgacgtcgtctcgaccgagaaggagatgattaagcgcttcctccgcgtcgtcagggagaaggaccccgacgtgctcatcacctacaacggcgacaacttcgacttcgcctacctgaagaagcgctgtgaggaactcggaataaagttcacactcggcagggacgggagcgagccgaagatacagcgaatgggcgaccgctttgccgttgaggtgaagggcaggattcacttcgacctctaccccgtcataaggcgcacgataaacctcccgacctacacccttgaggccgtttacgaggccgtctttggaaagcccaaggagaaggtttacgcagaggagatagcgcaggcctgggagagcggggagggccttgaaagggttgcaagatactcgatggaggacgctaaggtgacctacgagctgggaagggagttcttcccgatggaggcccagctttcgaggcttataggccagagcctctgggacgtctcgcgctcgagcaccggaaatgacgtggagtggttcctcctgcggaaggcctacaagaggaacgagctcgccccaaacaagcccgacgagagggagctcgcgagacggcgcgggggctacgctggcgggtacgttaaggaaccagagcggggattgtgggacaacattgtgtatttagacttccgctcgtggtatccttcaatcatcataacccacaacgtctcgccggataccctcaaccgcgagggctgtaaagagtacgacgtcgcccctgaggttggacacaagttctgcaaggacttccccggcttcataccaagcctcctgggagatttgctcgaggagaggcagaagatagagcggaagatgaaggcaacggttgacccgctggagaagaaactcctcgattacaggatgtggcttataaaaatcctcgccaacagcttctacggctactacggctacgccaaggcccggtggtactgcaaggagtgcgccgagagcgttacggcctggggaagggagtatatagaaatggttatccgggaactcgaagaaaaattcggttttaaagttctctatgccgatacagacggtctccatgctaccattcccggagcagacgctgaaacagtcaagaaaaaagcaaaggagttcttaaaatacattaatccaaaactgcccggcctgctcgaacttgagtacgagggcttctacgtgaggggcttcttcgtcacgaagaagaagtacgctgtgatagacgaggagggcaagataaccacgaggggtcttgagattgtgaggcgcgactggagcgagatagcgaaggagacccaggccagggtcttagaggcgatactcaagcacggtgacgtcgaggaggccgttaggatagtcaaggaagtgacggaaaagctgagcaagtatgaggtcccgcccgagaagctggtaatccacgagcagataacgcgcgatttgagggattacaaagccaccggcccgcacgttgccgttgcgaagaggctcgcggcgcgtggagtgaaaatccggcccggcacggtgataagctacatcgtcctaaagggctctggaaggataggcgacagggcgattccagctgatgagttcgacccgacgaagcaccgctacgatgcggaatactacatcgagaaccaggttctcccggcggtggagaggattctaaaagccttcggctatcggaaggaggatttgcgctaccagaagacgaagcaggtcggctcgggcgcgtggctgaaggtgaaggggaagaagggtaccgaagcttacgtagaacaaaaactcatctcagaagaggatctgaatagcgccgtcgaccatcatcatcatcatcattga

SEQ ID NO: 420 - protein, 802 aa, Artificial Sequence
  Description of Artificial Sequence:Thermococcus species 9degreesN-7 mutant DNA polymerase, 9degreesN mutant
MILDTDYITENGKPVIRVFKKENGEFKIEYDRTFEPYFYALLKDDSAIEDVKKVTAKRHGTVVKVKRAEKVQKKFLGRPIEVWKLYFNHPQDVPAIRDRIRAHPAVVDIYEYDIPFAKRYLIDKGLIPMEGDEELTMLAFAIATLYHEGEEFGTGPILMISYADGSEARVITWKKIDLPYVDVVSTEKEMIKRFLRVVREKDPDVLITYNGDNFDFAYLKKRCEELGIKFTLGRDGSEPKIQRMGDRFAVEVKGRIHFDLYPVIRRTINLPTYTLEAVYEAVFGKPKEKVYAEEIAQAWESGEGLERVARYSMEDAKVTYELGREFFPMEAQLSRLIGQSLWDVSRSSTGNDVEWFLLRKAYKRNELAPNKPDERELARRRGGYAGGYVKEPERGLWDNIVYLDFRSWYPSIIITHNVSPDTLNREGCKEYDVAPEVGHKFCKDFPGFIPSLLGDLLEERQKIERKMKATVDPLEKKLLDYRMWLIKILANSFYGYYGYAKARWYCKECAESVTAWGREYIEMVIRELEEKFGFKVLYADTDGLHATIPGADAETVKKKAKEFLKYINPKLPGLLELEYEGFYVRGFFVTKKKYAVIDEEGKITTRGLEIVRRDWSEIAKETQARVLEAILKHGDVEEAVRIVKEVTEKLSKYEVPPEKLVIHEQITRDLRDYKATGPHVAVAKRLAARGVKIRPGTVISYIVLKGSGRIGDRAIPADEFDPTKHRYDAEYYIENQVLPAVERILKAFGYRKEDLRYQKTKQVGSGAWLKVKGKKGTEAYVEQKLISEEDLNSAVDHHHHHH

SEQ ID NO: 421 - DNA, 2409 bp, Artificial Sequence
  Description of Artificial Sequence:Thermococcus species 9degreesN-7 mutant DNA polymerase, 9degreesN mutant
atgattctcgataccgactacatcaccgagaacgggaagcccgtgataagggtcttcaagaaggagaacggcgagtttaaaatcgagtacgacagaaccttcgagccctacttctacgcccttctgaaggacgattctgcgatagaggacgtcaagaaggtaaccgcaaagaggcacggaacggttgtcaaggtgaagcgcgccgagaaggtgcagaagaagttcctcggcaggccgatagaggtctggaagctctacttcaaccatcctcaggacgtcccggcgattcgagacaggatacgcgcccaccccgctgtcgttgacatctacgagtacgacatacccttcgccaagcgctacctcatcgacaagggcctgattccgatggagggcgacgaggagcttacgatgctcgccttcgcgatcgcaaccctctatcacgagggcgaggagttcggaaccgggccgattctcatgataagctacgccgacgggagcgaggcgagggtgataacctggaagaagattgaccttccgtacgttgacgtcgtctcgaccgagaaggagatgattaagcgcttcctccgcgtcgtcagggagaaggaccccgacgtgctcatcacctacaacggcgacaacttcgacttcgcctacctgaagaagcgctgtgaggaactcggaataaagttcacactcggcagggacgggagcgagccgaagatacagcgaatgggcgaccgctttgccgttgaggtgaagggcaggattcacttcgacctctaccccgtcataaggcgcacgataaacctcccgacctacacccttgaggccgtttacgaggccgtctttggaaagcccaaggagaaggtttacgcagaggagatagcgcaggcctgggagagcggggagggccttgaaagggttgcaagatactcgatggaggacgctaaggtgacctacgagctgggaagggagttcttcccgatggaggccccgctttcgaggcttataggccagagcctctgggacgtctcgcgctcgagcaccggaaatttggtggagtggttcctcctgcggaaggcctacaagaggaacgagctcgccccaaacaagcccgacgagagggagctcgcgagacggcgcgggggctacgctggcgggtacgttaaggaaccagagcggggattgtgggacaacattgtgtatttagacttccgctcgtggtatccttcaatcatcataacccacaacgtctcgccggataccctcaaccgcgagggctgtaaagagtacgacgtcgcccctgaggttggacacaagttctgcaaggacttccccggcttcataccaagcctcctgggagatttgctcgaggagaggcagaagatagagcggaagatgaaggcaacggttgacccgctggagaagaaactcctcgattacaggatgtggcttataaaaatcctcgccaacagcttctacggctactacggctacgccaaggcccggtggtactgcaaggagtgcgccgagagcgttacggcctggggaagggagtatatagaaatggttatccgggaactcgaagaaaaattcggttttaaagttctctatgccgatacagacggtctccatgctaccattcccggagcagacgctgaaacagtcaagaaaaaagcaaaggagttcttaaaatacattaatccaaaactgcccggcctgctcgaacttgagtacgagggcttctacgtgaggggcttcttcgtcacgaagaagaagtacgctgtgatagacgaggagggcaagataaccacgaggggtcttgagattgtgaggcgcgactggagcgagatagcgaaggagacccaggccagggtcttagaggcgatactcaagcacggtgacgtcgaggaggccgttaggatagtcaaggaagtgacggaaaagctgagcaagtatgaggtcccgcccgagaagctggtaatccacgagcagataacgcgcgatttgagggattacaaagccaccggcccgcacgttgccgttgcgaagaggctcgcggcgcgtggagtgaaaatccggcccggcacggtgataagctacatcgtcctaaagggctctggaaggataggcgacagggcgattccagctgatgagttcgacccgacgaagcaccgctacgatgcggaatactacatcgagaaccaggttctcccggcggtggagaggattctaaaagccttcggctatcggaaggaggatttgcgctaccagaagacgaagcaggtcggctcgggcgcgtggctgaaggtgaaggggaagaagggtaccgaagcttacgtagaacaaaaactcatctcagaagaggatctgaatagcgccgtcgaccatcatcatcatcatcattga

SEQ ID NO: 422 - protein, 802 aa, Artificial Sequence
  Description of Artificial Sequence:Thermococcus species 9degreesN-7 mutant DNA polymerase, 9degreesN mutant
MILDTDYITENGKPVIRVFKKENGEFKIEYDRTFEPYFYALLKDDSAIEDVKKVTAKRHGTVVKVKRAEKVQKKFLGRPIEVWKLYFNHPQDVPAIRDRIRAHPAVVDIYEYDIPFAKRYLIDKGLIPMEGDEELTMLAFAIATLYHEGEEFGTGPILMISYADGSEARVITWKKIDLPYVDVVSTEKEMIKRFLRVVREKDPDVLITYNGDNFDFAYLKKRCEELGIKFTLGRDGSEPKIQRMGDRFAVEVKGRIHFDLYPVIRRTINLPTYTLEAVYEAVFGKPKEKVYAEEIAQAWESGEGLERVARYSMEDAKVTYELGREFFPMEAPLSRLIGQSLWDVSRSSTGNLVEWFLLRKAYKRNELAPNKPDERELARRRGGYAGGYVKEPERGLWDNIVYLDFRSWYPSIIITHNVSPDTLNREGCKEYDVAPEVGHKFCKDFPGFIPSLLGDLLEERQKIERKMKATVDPLEKKLLDYRMWLIKILANSFYGYYGYAKARWYCKECAESVTAWGREYIEMVIRELEEKFGFKVLYADTDGLHATIPGADAETVKKKAKEFLKYINPKLPGLLELEYEGFYVRGFFVTKKKYAVIDEEGKITTRGLEIVRRDWSEIAKETQARVLEAILKHGDVEEAVRIVKEVTEKLSKYEVPPEKLVIHEQITRDLRDYKATGPHVAVAKRLAARGVKIRPGTVISYIVLKGSGRIGDRAIPADEFDPTKHRYDAEYYIENQVLPAVERILKAFGYRKEDLRYQKTKQVGSGAWLKVKGKKGTEAYVEQKLISEEDLNSAVDHHHHHH

SEQ ID NO: 423 - DNA, 2409 bp, Artificial Sequence
  Description of Artificial Sequence:Thermococcus species 9degreesN-7 mutant DNA polymerase, 9degreesN mutant
atgattctcgataccgactacatcaccgagaacgggaagcccgtgataagggtcttcaagaaggagaacggcgagtttaaaatcgagtacgacagaaccttcgagccctacttctacgcccttctgaaggacgattctgcgatagaggacgtcaagaaggtaaccgcaaagaggcacggaacggttgtcaaggtgaagcgcgccgagaaggtgcagaagaagttcctcggcaggccgatagaggtctggaagctctacttcaaccatcctcaggacgtcccggcgattcgagacaggatacgcgcccaccccgctgtcgttgacatctacgagtacgacatacccttcgccaagcgctacctcatcgacaagggcctgattccgatggagggcgacgaggagcttacgatgctcgccttcgcgatcgcaaccctctatcacgagggcgaggagttcggaaccgggccgattctcatgataagctacgccgacgggagcgaggcgagggtgataacctggaagaagattgaccttccgtacgttgacgtcgtctcgaccgagaaggagatgattaagcgcttcctccgcgtcgtcagggagaaggaccccgacgtgctcatcacctacaacggcgacaacttcgacttcgcctacctgaagaagcgctgtgaggaactcggaataaagttcacactcggcagggacgggagcgagccgaagatacagcgaatgggcgaccgctttgccgttgaggtgaagggcaggattcacttcgacctctaccccgtcataaggcgcacgataaacctcccgacctacacccttgaggccgtttacgaggccgtctttggaaagcccaaggagaaggtttacgcagaggagatagcgcaggcctgggagagcggggagggccttgaaagggttgcaagatactcgatggaggacgctaaggtgacctacgagctgggaagggagttcttcccgatggaggccccgctttcgaggcttataggccagagcctctgggacgtctcgcgctcgagcaccggaaatttggtggagtggttcctcctgcggaaggcctacaagaggaacgagctcgccccaaacaagcccgacgagagggagctcgcgagacggcgcgggggctacgctggcgggtacgttaaggaaccagagcggggattgtgggacaacattgtgtatttagacttccgctcgtggtatccttcaatcatcataacccacaacgtctcgccggataccctcaaccgcgagggctgtaaagagtacgacgtcgcccctgaggttggacacaagttctgcaaggacttccccggcttcataccaagcctcctgggagatttgctcgaggagaggcagaagatacctcggaagatgaaggcaacggttgacccgctggagaagaaactcctcgattacaggatgtggcttataaaaatcctcgccaacagcttctacggctactacggctacgccaaggcccggtggtactgcaaggagtgcgccgagagcgttacggcctggggaagggagtatatagaaatggttatccgggaactcgaagaaaaattcggttttaaagttctctatgccgatacagacggtctccatgctaccattcccggagcagacgctgaaacagtcaagaaaaaagcaaaggagttcttaaaatacattaatccaaaactgcccggcctgctcgaacttgagtacgagggcttctacgtgaggggcttcttcgtcacgaagaagaagtacgctgtgatagacgaggagggcaagataaccacgaggggtcttgagattgtgaggcgcgactggagcgagatagcgaaggagacccaggccagggtcttagaggcgatactcaagcacggtgacgtcgaggaggccgttaggatagtcaaggaagtgacggaaaagctgagcaagtatgaggtcccgcccgagaagctggtaatccacgagcagataacgcgcgatttgagggattacaaagccaccggcccgcacgttgccgttgcgaagaggctcgcggcgcgtggagtgaaaatccggcccggcacggtgataagctacatcgtcctaaagggctctggaaggataggcgacagggcgattccagctgatgagttcgacccgacgaagcaccgctacgatgcggaatactacatcgagaaccaggttctcccggcggtggagaggattctaaaagccttcggctatcggaaggaggatttgcgctaccagaagacgaagcaggtcggctcgggcgcgtggctgaaggtgaaggggaagaagggtaccgaagcttacgtagaacaaaaactcatctcagaagaggatctgaatagcgccgtcgaccatcatcatcatcatcattga

SEQ ID NO: 424 - protein, 802 aa, Artificial Sequence
  Description of Artificial Sequence:Thermococcus species 9degreesN-7 mutant DNA polymerase, 9degreesN mutant
MILDTDYITENGKPVIRVFKKENGEFKIEYDRTFEPYFYALLKDDSAIEDVKKVTAKRHGTVVKVKRAEKVQKKFLGRPIEVWKLYFNHPQDVPAIRDRIRAHPAVVDIYEYDIPFAKRYLIDKGLIPMEGDEELTMLAFAIATLYHEGEEFGTGPILMISYADGSEARVITWKKIDLPYVDVVSTEKEMIKRFLRVVREKDPDVLITYNGDNFDFAYLKKRCEELGIKFTLGRDGSEPKIQRMGDRFAVEVKGRIHFDLYPVIRRTINLPTYTLEAVYEAVFGKPKEKVYAEEIAQAWESGEGLERVARYSMEDAKVTYELGREFFPMEAPLSRLIGQSLWDVSRSSTGNLVEWFLLRKAYKRNELAPNKPDERELARRRGGYAGGYVKEPERGLWDNIVYLDFRSWYPSIIITHNVSPDTLNREGCKEYDVAPEVGHKFCKDFPGFIPSLLGDLLEERQKIPRKMKATVDPLEKKLLDYRMWLIKILANSFYGYYGYAKARWYCKECAESVTAWGREYIEMVIRELEEKFGFKVLYADTDGLHATIPGADAETVKKKAKEFLKYINPKLPGLLELEYEGFYVRGFFVTKKKYAVIDEEGKITTRGLEIVRRDWSEIAKETQARVLEAILKHGDVEEAVRIVKEVTEKLSKYEVPPEKLVIHEQITRDLRDYKATGPHVAVAKRLAARGVKIRPGTVISYIVLKGSGRIGDRAIPADEFDPTKHRYDAEYYIENQVLPAVERILKAFGYRKEDLRYQKTKQVGSGAWLKVKGKKGTEAYVEQKLISEEDLNSAVDHHHHHH

SEQ ID NO: 425 - DNA, 2409 bp, Artificial Sequence
  Description of Artificial Sequence:Thermococcus species 9degreesN-7 mutant DNA polymerase, 9degreesN mutant
atgattctcgataccgactacatcaccgagaacgggaagcccgtgataagggtcttcaagaaggagaacggcgagtttaaaatcgagtacgacagaaccttcgagccctacttctacgcccttctgaaggacgattctgcgatagaggacgtcaagaaggtaaccgcaaagaggcacggaacggttgtcaaggtgaagcgcgccgagaaggtgcagaagaagttcctcggcaggccgatagaggtctggaagctctacttcaaccatcctcaggacgtcccggcgattcgagacaggatacgcgcccaccccgctgtcgttgacatctacgagtacgacatacccttcgccaagcgctacctcatcgacaagggcctgattccgatggagggcgacgaggagcttacgatgctcgccttcgcgatcgcaaccctctatcacgagggcgaggagttcggaaccgggccgattctcatgataagctacgccgacgggagcgaggcgagggtgataacctggaagaagattgaccttccgtacgttgacgtcgtctcgaccgagaaggagatgattaagcgcttcctccgcgtcgtcagggagaaggaccccgacgtgctcatcacctacaacggcgacaacttcgacttcgcctacctgaagaagcgctgtgaggaactcggaataaagttcacactcggcagggacgggagcgagccgaagatacagcgaatgggcgaccgctttgccgttgaggtgaagggcaggattcacttcgacctctaccccgtcataaggcgcacgataaacctcccgacctacacccttgaggccgtttacgaggccgtctttggaaagcccaaggagaaggtttacgcagaggagatagcgcaggcctgggagagcggggagggccttgaaagggttgcaagatactcgatggaggacgctaaggtgacctacgagctgggaagggagttcttcccgatggaggccgatctttcgaggcttataggccagagcctctgggacgtctcgcgctcgagcaccggaaatttggtggagtggttcctcctgcggaaggcctacaagaggaacgagctcgccccaaacaagcccgacgagagggagctcgcgagacggcgcgggggctacgctggcgggtacgttaaggaaccagagcggggattgtgggacaacattgtgtatttagacttccgctcgtggtatccttcaatcatcataacccacaacgtctcgccggataccctcaaccgcgagggctgtaaagagtacgacgtcgcccctgaggttggacacaagttctgcaaggacttccccggcttcataccaagcctcctgggagatttgctcgaggagaggcagaagatagagcggaagatgaaggcaacggttgacccgctggagaagaaactcctcgattacaggatgtggcttataaaaatcctcgccaacagcttctacggctactacggctacgccaaggcccggtggtactgcaaggagtgcgccgagagcgttacggcctggggaagggagtatatagaaatggttatccgggaactcgaagaaaaattcggttttaaagttctctatgccgatacagacggtctccatgctaccattcccggagcagacgctgaaacagtcaagaaaaaagcaaaggagttcttaaaatacattaatccaaaactgcccggcctgctcgaacttgagtacgagggcttctacgtgaggggcttcttcgtcacgaagaagaagtacgctgtgatagacgaggagggcaagataaccacgaggggtcttgagattgtgaggcgcgactggagcgagatagcgaaggagacccaggccagggtcttagaggcgatactcaagcacggtgacgtcgaggaggccgttaggatagtcaaggaagtgacggaaaagctgagcaagtatgaggtcccgcccgagaagctggtaatccacgagcagataacgcgcgatttgagggattacaaagccaccggcccgcacgttgccgttgcgaagaggctcgcggcgcgtggagtgaaaatccggcccggcacggtgataagctacatcgtcctaaagggctctggaaggataggcgacagggcgattccagctgatgagttcgacccgacgaagcaccgctacgatgcggaatactacatcgagaaccaggttctcccggcggtggagaggattctaaaagccttcggctatcggaaggaggatttgcgctaccagaagacgaagcaggtcggctcgggcgcgtggctgaaggtgaaggggaagaagggtaccgaagcttacgtagaacaaaaactcatctcagaagaggatctgaatagcgccgtcgaccatcatcatcatcatcattga

SEQ ID NO: 426 - protein, 802 aa, Artificial Sequence
  Description of Artificial Sequence:Thermococcus species 9degreesN-7 mutant DNA polymerase, 9degreesN mutant
MILDTDYITENGKPVIRVFKKENGEFKIEYDRTFEPYFYALLKDDSAIEDVKKVTAKRHGTVVKVKRAEKVQKKFLGRPIEVWKLYFNHPQDVPAIRDRIRAHPAVVDIYEYDIPFAKRYLIDKGLIPMEGDEELTMLAFAIATLYHEGEEFGTGPILMISYADGSEARVITWKKIDLPYVDVVSTEKEMIKRFLRVVREKDPDVLITYNGDNFDFAYLKKRCEELGIKFTLGRDGSEPKIQRMGDRFAVEVKGRIHFDLYPVIRRTINLPTYTLEAVYEAVFGKPKEKVYAEEIAQAWESGEGLERVARYSMEDAKVTYELGREFFPMEADLSRLIGQSLWDVSRSSTGNLVEWFLLRKAYKRNELAPNKPDERELARRRGGYAGGYVKEPERGLWDNIVYLDFRSWYPSIIITHNVSPDTLNREGCKEYDVAPEVGHKFCKDFPGFIPSLLGDLLEERQKIERKMKATVDPLEKKLLDYRMWLIKILANSFYGYYGYAKARWYCKECAESVTAWGREYIEMVIRELEEKFGFKVLYADTDGLHATIPGADAETVKKKAKEFLKYINPKLPGLLELEYEGFYVRGFFVTKKKYAVIDEEGKITTRGLEIVRRDWSEIAKETQARVLEAILKHGDVEEAVRIVKEVTEKLSKYEVPPEKLVIHEQITRDLRDYKATGPHVAVAKRLAARGVKIRPGTVISYIVLKGSGRIGDRAIPADEFDPTKHRYDAEYYIENQVLPAVERILKAFGYRKEDLRYQKTKQVGSGAWLKVKGKKGTEAYVEQKLISEEDLNSAVDHHHHHH

SEQ ID NO: 427 - DNA, 2409 bp, Artificial Sequence
  Description of Artificial Sequence:Thermococcus species 9degreesN-7 mutant DNA polymerase, 9degreesN mutant
atgattctcgataccgactacatcaccgagaacgggaagcccgtgataagggtcttcaagaaggagaacggcgagtttaaaatcgagtacgacagaaccttcgagccctacttctacgcccttctgaaggacgattctgcgatagaggacgtcaagaaggtaaccgcaaagaggcacggaacggttgtcaaggtgaagcgcgccgagaaggtgcagaagaagttcctcggcaggccgatagaggtctggaagctctacttcaaccatcctcaggacgtcccggcgattcgagacaggatacgcgcccaccccgctgtcgttgacatctacgagtacgacatacccttcgccaagcgctacctcatcgacaagggcctgattccgatggagggcgacgaggagcttacgatgctcgccttcgcgatcgcaaccctctatcacgagggcgaggagttcggaaccgggccgattctcatgataagctacgccgacgggagcgaggcgagggtgataacctggaagaagattgaccttccgtacgttgacgtcgtctcgaccgagaaggagatgattaagcgcttcctccgcgtcgtcagggagaaggaccccgacgtgctcatcacctacaacggcgacaacttcgacttcgcctacctgaagaagcgctgtgaggaactcggaataaagttcacactcggcagggacgggagcgagccgaagatacagcgaatgggcgaccgctttgccgttgaggtgaagggcaggattcacttcgacctctaccccgtcataaggcgcacgataaacctcccgacctacacccttgaggccgtttacgaggccgtctttggaaagcccaaggagaaggtttacgcagaggagatagcgcaggcctgggagagcggggagggccttgaaagggttgcaagatactcgatggaggacgctaaggtgacctacgagctgggaagggagttcttcccgatggaggccacactttcgaggcttataggccagagcctctgggacgtctcgcgctcgagcaccggaaatttggtggagtggttcctcctgcggaaggcctacaagaggaacgagctcgccccaaacaagcccgacgagagggagctcgcgagacggcgcgggggctacgctggcgggtacgttaaggaaccagagcggggattgtgggacaacattgtgtatttagacttccgctcgtggtatccttcaatcatcataacccacaacgtctcgccggataccctcaaccgcgagggctgtaaagagtacgacgtcgcccctgaggttggacacaagttctgcaaggacttccccggcttcataccaagcctcctgggagatttgctcgaggagaggcagaagatagagcggaagatgaaggcaacggttgacccgctggagaagaaactcctcgattacaggatgtggcttataaaaatcctcgccaacagcttctacggctactacggctacgccaaggcccggtggtactgcaaggagtgcgccgagagcgttacggcctggggaagggagtatatagaaatggttatccgggaactcgaagaaaaattcggttttaaagttctctatgccgatacagacggtctccatgctaccattcccggagcagacgctgaaacagtcaagaaaaaagcaaaggagttcttaaaatacattaatccaaaactgcccggcctgctcgaacttgagtacgagggcttctacgtgaggggcttcttcgtcacgaagaagaagtacgctgtgatagacgaggagggcaagataaccacgaggggtcttgagattgtgaggcgcgactggagcgagatagcgaaggagacccaggccagggtcttagaggcgatactcaagcacggtgacgtcgaggaggccgttaggatagtcaaggaagtgacggaaaagctgagcaagtatgaggtcccgcccgagaagctggtaatccacgagcagataacgcgcgatttgagggattacaaagccaccggcccgcacgttgccgttgcgaagaggctcgcggcgcgtggagtgaaaatccggcccggcacggtgataagctacatcgtcctaaagggctctggaaggataggcgacagggcgattccagctgatgagttcgacccgacgaagcaccgctacgatgcggaatactacatcgagaaccaggttctcccggcggtggagaggattctaaaagccttcggctatcggaaggaggatttgcgctaccagaagacgaagcaggtcggctcgggcgcgtggctgaaggtgaaggggaagaagggtaccgaagcttacgtagaacaaaaactcatctcagaagaggatctgaatagcgccgtcgaccatcatcatcatcatcattga

SEQ ID NO: 428 - protein, 802 aa, Artificial Sequence
  Description of Artificial Sequence:Thermococcus species 9degreesN-7 mutant DNA polymerase, 9degreesN mutant
MILDTDYITENGKPVIRVFKKENGEFKIEYDRTFEPYFYALLKDDSAIEDVKKVTAKRHGTVVKVKRAEKVQKKFLGRPIEVWKLYFNHPQDVPAIRDRIRAHPAVVDIYEYDIPFAKRYLIDKGLIPMEGDEELTMLAFAIATLYHEGEEFGTGPILMISYADGSEARVITWKKIDLPYVDVVSTEKEMIKRFLRVVREKDPDVLITYNGDNFDFAYLKKRCEELGIKFTLGRDGSEPKIQRMGDRFAVEVKGRIHFDLYPVIRRTINLPTYTLEAVYEAVFGKPKEKVYAEEIAQAWESGEGLERVARYSMEDAKVTYELGREFFPMEATLSRLIGQSLWDVSRSSTGNLVEWFLLRKAYKRNELAPNKPDERELARRRGGYAGGYVKEPERGLWDNIVYLDFRSWYPSIIITHNVSPDTLNREGCKEYDVAPEVGHKFCKDFPGFIPSLLGDLLEERQKIERKMKATVDPLEKKLLDYRMWLIKILANSFYGYYGYAKARWYCKECAESVTAWGREYIEMVIRELEEKFGFKVLYADTDGLHATIPGADAETVKKKAKEFLKYINPKLPGLLELEYEGFYVRGFFVTKKKYAVIDEEGKITTRGLEIVRRDWSEIAKETQARVLEAILKHGDVEEAVRIVKEVTEKLSKYEVPPEKLVIHEQITRDLRDYKATGPHVAVAKRLAARGVKIRPGTVISYIVLKGSGRIGDRAIPADEFDPTKHRYDAEYYIENQVLPAVERILKAFGYRKEDLRYQKTKQVGSGAWLKVKGKKGTEAYVEQKLISEEDLNSAVDHHHHHH

SEQ ID NO: 429 - DNA, 2409 bp, Artificial Sequence
  Description of Artificial Sequence:Thermococcus species 9degreesN-7 mutant DNA polymerase, 9degreesN mutant
atgattctcgataccgactacatcaccgagaacgggaagcccgtgataagggtcttcaagaaggagaacggcgagtttaaaatcgagtacgacagaaccttcgagccctacttctacgcccttctgaaggacgattctgcgatagaggacgtcaagaaggtaaccgcaaagaggcacggaacggttgtcaaggtgaagcgcgccgagaaggtgcagaagaagttcctcggcaggccgatagaggtctggaagctctacttcaaccatcctcaggacgtcccggcgattcgagacaggatacgcgcccaccccgctgtcgttgacatctacgagtacgacatacccttcgccaagcgctacctcatcgacaagggcctgattccgatggagggcgacgaggagcttacgatgctcgccttcgcgatcgcaaccctctatcacgagggcgaggagttcggaaccgggccgattctcatgataagctacgccgacgggagcgaggcgagggtgataacctggaagaagattgaccttccgtacgttgacgtcgtctcgaccgagaaggagatgattaagcgcttcctccgcgtcgtcagggagaaggaccccgacgtgctcatcacctacaacggcgacaacttcgacttcgcctacctgaagaagcgctgtgaggaactcggaataaagttcacactcggcagggacgggagcgagccgaagatacagcgaatgggcgaccgctttgccgttgaggtgaagggcaggattcacttcgacctctaccccgtcataaggcgcacgataaacctcccgacctacacccttgaggccgtttacgaggccgtctttggaaagcccaaggagaaggtttacgcagaggagatagcgcaggcctgggagagcggggagggccttgaaagggttgcaagatactcgatggaggacgctaaggtgacctacgagctgggaagggagttcttcccgatggaggccgttctttcgaggcttataggccagagcctctgggacgtctcgcgctcgagcaccggaaatttggtggagtggttcctcctgcggaaggcctacaagaggaacgagctcgccccaaacaagcccgacgagagggagctcgcgagacggcgcgggggctacgctggcgggtacgttaaggaaccagagcggggattgtgggacaacattgtgtatttagacttccgctcgtggtatccttcaatcatcataacccacaacgtctcgccggataccctcaaccgcgagggctgtaaagagtacgacgtcgcccctgaggttggacacaagttctgcaaggacttccccggcttcataccaagcctcctgggagatttgctcgaggagaggcagaagatagagcggaagatgaaggcaacggttgacccgctggagaagaaactcctcgattacaggatgtggcttataaaaatcctcgccaacagcttctacggctactacggctacgccaaggcccggtggtactgcaaggagtgcgccgagagcgttacggcctggggaagggagtatatagaaatggttatccgggaactcgaagaaaaattcggttttaaagttctctatgccgatacagacggtctccatgctaccattcccggagcagacgctgaaacagtcaagaaaaaagcaaaggagttcttaaaatacattaatccaaaactgcccggcctgctcgaacttgagtacgagggcttctacgtgaggggcttcttcgtcacgaagaagaagtacgctgtgatagacgaggagggcaagataaccacgaggggtcttgagattgtgaggcgcgactggagcgagatagcgaaggagacccaggccagggtcttagaggcgatactcaagcacggtgacgtcgaggaggccgttaggatagtcaaggaagtgacggaaaagctgagcaagtatgaggtcccgcccgagaagctggtaatccacgagcagataacgcgcgatttgagggattacaaagccaccggcccgcacgttgccgttgcgaagaggctcgcggcgcgtggagtgaaaatccggcccggcacggtgataagctacatcgtcctaaagggctctggaaggataggcgacagggcgattccagctgatgagttcgacccgacgaagcaccgctacgatgcggaatactacatcgagaaccaggttctcccggcggtggagaggattctaaaagccttcggctatcggaaggaggatttgcgctaccagaagacgaagcaggtcggctcgggcgcgtggctgaaggtgaaggggaagaagggtaccgaagcttacgtagaacaaaaactcatctcagaagaggatctgaatagcgccgtcgaccatcatcatcatcatcattga

SEQ ID NO: 430 - protein, 802 aa, Artificial Sequence
  Description of Artificial Sequence:Thermococcus species 9degreesN-7 mutant DNA polymerase, 9degreesN mutant
MILDTDYITENGKPVIRVFKKENGEFKIEYDRTFEPYFYALLKDDSAIEDVKKVTAKRHGTVVKVKRAEKVQKKFLGRPIEVWKLYFNHPQDVPAIRDRIRAHPAVVDIYEYDIPFAKRYLIDKGLIPMEGDEELTMLAFAIATLYHEGEEFGTGPILMISYADGSEARVITWKKIDLPYVDVVSTEKEMIKRFLRVVREKDPDVLITYNGDNFDFAYLKKRCEELGIKFTLGRDGSEPKIQRMGDRFAVEVKGRIHFDLYPVIRRTINLPTYTLEAVYEAVFGKPKEKVYAEEIAQAWESGEGLERVARYSMEDAKVTYELGREFFPMEAVLSRLIGQSLWDVSRSSTGNLVEWFLLRKAYKRNELAPNKPDERELARRRGGYAGGYVKEPERGLWDNIVYLDFRSWYPSIIITHNVSPDTLNREGCKEYDVAPEVGHKFCKDFPGFIPSLLGDLLEERQKIERKMKATVDPLEKKLLDYRMWLIKILANSFYGYYGYAKARWYCKECAESVTAWGREYIEMVIRELEEKFGFKVLYADTDGLHATIPGADAETVKKKAKEFLKYINPKLPGLLELEYEGFYVRGFFVTKKKYAVIDEEGKITTRGLEIVRRDWSEIAKETQARVLEAILKHGDVEEAVRIVKEVTEKLSKYEVPPEKLVIHEQITRDLRDYKATGPHVAVAKRLAARGVKIRPGTVISYIVLKGSGRIGDRAIPADEFDPTKHRYDAEYYIENQVLPAVERILKAFGYRKEDLRYQKTKQVGSGAWLKVKGKKGTEAYVEQKLISEEDLNSAVDHHHHHH

SEQ ID NO: 431 - DNA, 2409 bp, Artificial Sequence
  Description of Artificial Sequence:Thermococcus species 9degreesN-7 mutant DNA polymerase, 9degreesN mutant
atgattctcgataccgactacatcaccgagaacgggaagcccgtgataagggtcttcaagaaggagaacggcgagtttaaaatcgagtacgacagaaccttcgagccctacttctacgcccttctgaaggacgattctgcgatagaggacgtcaagaaggtaaccgcaaagaggcacggaacggttgtcaaggtgaagcgcgccgagaaggtgcagaagaagttcctcggcaggccgatagaggtctggaagctctacttcaaccatcctcaggacgtcccggcgattcgagacaggatacgcgcccaccccgctgtcgttgacatctacgagtacgacatacccttcgccaagcgctacctcatcgacaagggcctgattccgatggagggcgacgaggagcttacgatgctcgccttcgcgatcgcaaccctctatcacgagggcgaggagttcggaaccgggccgattctcatgataagctacgccgacgggagcgaggcgagggtgataacctggaagaagattgaccttccgtacgttgacgtcgtctcgaccgagaaggagatgattaagcgcttcctccgcgtcgtcagggagaaggaccccgacgtgctcatcacctacaacggcgacaacttcgacttcgcctacctgaagaagcgctgtgaggaactcggaataaagttcacactcggcagggacgggagcgagccgaagatacagcgaatgggcgaccgctttgccgttgaggtgaagggcaggattcacttcgacctctaccccgtcataaggcgcacgataaacctcccgacctacacccttgaggccgtttacgaggccgtctttggaaagcccaaggagaaggtttacgcagaggagatagcgcaggcctgggagagcggggagggccttgaaagggttgcaagatactcgatggaggacgctaaggtgacctacgagctgggaagggagttcttcccgatggaggcccagctttcgaggcttataggccagagcctctgggacgtctcgcgctcgagcaccggaaatttggtggagtggttcctcctgcggaaggcctacaagaggaacgagctcgccccaaacaagcccgacgagagggagctcgcgagacggcgcgggggctacgctggcgggtacgttaaggaaccagagcggggattgtgggacaacattgtgtatttagacttccgctcgtggtatccttcaatcatcataacccacaacgtctcgccggataccctcaaccgcgagggctgtaaagagtacgacgtcgcccctgaggttggacacaagttctgcaaggacttccccggcttcataccaagcctcctgggagatttgctcgaggagaggctgaagatagagcggaagatgaaggcaacggttgacccgctggagaagaaactcctcgattacaggatgtggcttataaaaatcctcgccaacagcttctacggctactacggctacgccaaggcccggtggtactgcaaggagtgcgccgagagcgttacggcctggggaagggagtatatagaaatggttatccgggaactcgaagaaaaattcggttttaaagttctctatgccgatacagacggtctccatgctaccattcccggagcagacgctgaaacagtcaagaaaaaagcaaaggagttcttaaaatacattaatccaaaactgcccggcctgctcgaacttgagtacgagggcttctacgtgaggggcttcttcgtcacgaagaagaagtacgctgtgatagacgaggagggcaagataaccacgaggggtcttgagattgtgaggcgcgactggagcgagatagcgaaggagacccaggccagggtcttagaggcgatactcaagcacggtgacgtcgaggaggccgttaggatagtcaaggaagtgacggaaaagctgagcaagtatgaggtcccgcccgagaagctggtaatccacgagcagataacgcgcgatttgagggattacaaagccaccggcccgcacgttgccgttgcgaagaggctcgcggcgcgtggagtgaaaatccggcccggcacggtgataagctacatcgtcctaaagggctctggaaggataggcgacagggcgattccagctgatgagttcgacccgacgaagcaccgctacgatgcggaatactacatcgagaaccaggttctcccggcggtggagaggattctaaaagccttcggctatcggaaggaggatttgcgctaccagaagacgaagcaggtcggctcgggcgcgtggctgaaggtgaaggggaagaagggtaccgaagcttacgtagaacaaaaactcatctcagaagaggatctgaatagcgccgtcgaccatcatcatcatcatcattga

SEQ ID NO: 432 - protein, 802 aa, Artificial Sequence
  Description of Artificial Sequence:Thermococcus species 9degreesN-7 mutant DNA polymerase, 9degreesN mutant
MILDTDYITENGKPVIRVFKKENGEFKIEYDRTFEPYFYALLKDDSAIEDVKKVTAKRHGTVVKVKRAEKVQKKFLGRPIEVWKLYFNHPQDVPAIRDRIRAHPAVVDIYEYDIPFAKRYLIDKGLIPMEGDEELTMLAFAIATLYHEGEEFGTGPILMISYADGSEARVITWKKIDLPYVDVVSTEKEMIKRFLRVVREKDPDVLITYNGDNFDFAYLKKRCEELGIKFTLGRDGSEPKIQRMGDRFAVEVKGRIHFDLYPVIRRTINLPTYTLEAVYEAVFGKPKEKVYAEEIAQAWESGEGLERVARYSMEDAKVTYELGREFFPMEAQLSRLIGQSLWDVSRSSTGNLVEWFLLRKAYKRNELAPNKPDERELARRRGGYAGGYVKEPERGLWDNIVYLDFRSWYPSIIITHNVSPDTLNREGCKEYDVAPEVGHKFCKDFPGFIPSLLGDLLEERLKIERKMKATVDPLEKKLLDYRMWLIKILANSFYGYYGYAKARWYCKECAESVTAWGREYIEMVIRELEEKFGFKVLYADTDGLHATIPGADAETVKKKAKEFLKYINPKLPGLLELEYEGFYVRGFFVTKKKYAVIDEEGKITTRGLEIVRRDWSEIAKETQARVLEAILKHGDVEEAVRIVKEVTEKLSKYEVPPEKLVIHEQITRDLRDYKATGPHVAVAKRLAARGVKIRPGTVISYIVLKGSGRIGDRAIPADEFDPTKHRYDAEYYIENQVLPAVERILKAFGYRKEDLRYQKTKQVGSGAWLKVKGKKGTEAYVEQKLISEEDLNSAVDHHHHHH

SEQ ID NO: 433 - DNA, 2409 bp, Artificial Sequence
  Description of Artificial Sequence:Thermococcus species 9degreesN-7 mutant DNA polymerase, 9degreesN mutant
atgattctcgataccgactacatcaccgagaacgggaagcccgtgataagggtcttcaagaaggagaacggcgagtttaaaatcgagtacgacagaaccttcgagccctacttctacgcccttctgaaggacgattctgcgatagaggacgtcaagaaggtaaccgcaaagaggcacggaacggttgtcaaggtgaagcgcgccgagaaggtgcagaagaagttcctcggcaggccgatagaggtctggaagctctacttcaaccatcctcaggacgtcccggcgattcgagacaggatacgcgcccaccccgctgtcgttgacatctacgagtacgacatacccttcgccaagcgctacctcatcgacaagggcctgattccgatggagggcgacgaggagcttacgatgctcgccttcgcgatcgcaaccctctatcacgagggcgaggagttcggaaccgggccgattctcatgataagctacgccgacgggagcgaggcgagggtgataacctggaagaagattgaccttccgtacgttgacgtcgtctcgaccgagaaggagatgattaagcgcttcctccgcgtcgtcagggagaaggaccccgacgtgctcatcacctacaacggcgacaacttcgacttcgcctacctgaagaagcgctgtgaggaactcggaataaagttcacactcggcagggacgggagcgagccgaagatacagcgaatgggcgaccgctttgccgttgaggtgaagggcaggattcacttcgacctctaccccgtcataaggcgcacgataaacctcccgacctacacccttgaggccgtttacgaggccgtctttggaaagcccaaggagaaggtttacgcagaggagatagcgcaggcctgggagagcggggagggccttgaaagggttgcaagatactcgatggaggacgctaaggtgacctacgagctgggaagggagttcttcccgatggaggcccagctttcgaggcttataggccagagcctctgggacgtctcgcgctcgagcaccggaaatttggtggagtggttcctcctgcggaaggcctacaagaggaacgagctcgccccaaacaagcccgacgagagggagctcgcgagacggcgcgggggctacgctggcgggtacgttaaggaaccagagcggggattgtgggacaacattgtgtatttagacttccgctcgtggtatccttcaatcatcataacccacaacgtctcgccggataccctcaaccgcgagggctgtaaagagtacgacgtcgcccctgaggttggacacaagttctgcaaggacttccccggcttcataccaagcctcctgggagatttgctcgaggagaggtcaaagatagagcggaagatgaaggcaacggttgacccgctggagaagaaactcctcgattacaggatgtggcttataaaaatcctcgccaacagcttctacggctactacggctacgccaaggcccggtggtactgcaaggagtgcgccgagagcgttacggcctggggaagggagtatatagaaatggttatccgggaactcgaagaaaaattcggttttaaagttctctatgccgatacagacggtctccatgctaccattcccggagcagacgctgaaacagtcaagaaaaaagcaaaggagttcttaaaatacattaatccaaaactgcccggcctgctcgaacttgagtacgagggcttctacgtgaggggcttcttcgtcacgaagaagaagtacgctgtgatagacgaggagggcaagataaccacgaggggtcttgagattgtgaggcgcgactggagcgagatagcgaaggagacccaggccagggtcttagaggcgatactcaagcacggtgacgtcgaggaggccgttaggatagtcaaggaagtgacggaaaagctgagcaagtatgaggtcccgcccgagaagctggtaatccacgagcagataacgcgcgatttgagggattacaaagccaccggcccgcacgttgccgttgcgaagaggctcgcggcgcgtggagtgaaaatccggcccggcacggtgataagctacatcgtcctaaagggctctggaaggataggcgacagggcgattccagctgatgagttcgacccgacgaagcaccgctacgatgcggaatactacatcgagaaccaggttctcccggcggtggagaggattctaaaagccttcggctatcggaaggaggatttgcgctaccagaagacgaagcaggtcggctcgggcgcgtggctgaaggtgaaggggaagaagggtaccgaagcttacgtagaacaaaaactcatctcagaagaggatctgaatagcgccgtcgaccatcatcatcatcatcattga

SEQ ID NO: 434 - protein, 802 aa, Artificial Sequence
  Description of Artificial Sequence:Thermococcus species 9degreesN-7 mutant DNA polymerase, 9degreesN mutant
MILDTDYITENGKPVIRVFKKENGEFKIEYDRTFEPYFYALLKDDSAIEDVKKVTAKRHGTVVKVKRAEKVQKKFLGRPIEVWKLYFNHPQDVPAIRDRIRAHPAVVDIYEYDIPFAKRYLIDKGLIPMEGDEELTMLAFAIATLYHEGEEFGTGPILMISYADGSEARVITWKKIDLPYVDVVSTEKEMIKRFLRVVREKDPDVLITYNGDNFDFAYLKKRCEELGIKFTLGRDGSEPKIQRMGDRFAVEVKGRIHFDLYPVIRRTINLPTYTLEAVYEAVFGKPKEKVYAEEIAQAWESGEGLERVARYSMEDAKVTYELGREFFPMEAQLSRLIGQSLWDVSRSSTGNLVEWFLLRKAYKRNELAPNKPDERELARRRGGYAGGYVKEPERGLWDNIVYLDFRSWYPSIIITHNVSPDTLNREGCKEYDVAPEVGHKFCKDFPGFIPSLLGDLLEERSKIERKMKATVDPLEKKLLDYRMWLIKILANSFYGYYGYAKARWYCKECAESVTAWGREYIEMVIRELEEKFGFKVLYADTDGLHATIPGADAETVKKKAKEFLKYINPKLPGLLELEYEGFYVRGFFVTKKKYAVIDEEGKITTRGLEIVRRDWSEIAKETQARVLEAILKHGDVEEAVRIVKEVTEKLSKYEVPPEKLVIHEQITRDLRDYKATGPHVAVAKRLAARGVKIRPGTVISYIVLKGSGRIGDRAIPADEFDPTKHRYDAEYYIENQVLPAVERILKAFGYRKEDLRYQKTKQVGSGAWLKVKGKKGTEAYVEQKLISEEDLNSAVDHHHHHH

SEQ ID NO: 435 - DNA, 2409 bp, Artificial Sequence
  Description of Artificial Sequence:Thermococcus species 9degreesN-7 mutant DNA polymerase, 9degreesN mutant
atgattctcgataccgactacatcaccgagaacgggaagcccgtgataagggtcttcaagaaggagaacggcgagtttaaaatcgagtacgacagaaccttcgagccctacttctacgcccttctgaaggacgattctgcgatagaggacgtcaagaaggtaaccgcaaagaggcacggaacggttgtcaaggtgaagcgcgccgagaaggtgcagaagaagttcctcggcaggccgatagaggtctggaagctctacttcaaccatcctcaggacgtcccggcgattcgagacaggatacgcgcccaccccgctgtcgttgacatctacgagtacgacatacccttcgccaagcgctacctcatcgacaagggcctgattccgatggagggcgacgaggagcttacgatgctcgccttcgcgatcgcaaccctctatcacgagggcgaggagttcggaaccgggccgattctcatgataagctacgccgacgggagcgaggcgagggtgataacctggaagaagattgaccttccgtacgttgacgtcgtctcgaccgagaaggagatgattaagcgcttcctccgcgtcgtcagggagaaggaccccgacgtgctcatcacctacaacggcgacaacttcgacttcgcctacctgaagaagcgctgtgaggaactcggaataaagttcacactcggcagggacgggagcgagccgaagatacagcgaatgggcgaccgctttgccgttgaggtgaagggcaggattcacttcgacctctaccccgtcataaggcgcacgataaacctcccgacctacacccttgaggccgtttacgaggccgtctttggaaagcccaaggagaaggtttacgcagaggagatagcgcaggcctgggagagcggggagggccttgaaagggttgcaagatactcgatggaggacgctaaggtgacctacgagctgggaagggagttcttcccgatggaggcccagctttcgaggcttataggccagagcctctgggacgtctcgcgctcgagcaccggaaatttggtggagtggttcctcctgcggaaggcctacaagaggaacgagctcgccccaaacaagcccgacgagagggagctcgcgagacggcgcgggggctacgctggcgggtacgttaaggaaccagagcggggattgtgggacaacattgtgtatttagacttccgctcgtggtatccttcaatcatcataacccacaacgtctcgccggataccctcaaccgcgagggctgtaaagagtacgacgtcgcccctgaggttggacacaagttctgcaaggacttccccggcttcataccaagcctcctgggagatttgctcgaggagagggtaaagatagagcggaagatgaaggcaacggttgacccgctggagaagaaactcctcgattacaggatgtggcttataaaaatcctcgccaacagcttctacggctactacggctacgccaaggcccggtggtactgcaaggagtgcgccgagagcgttacggcctggggaagggagtatatagaaatggttatccgggaactcgaagaaaaattcggttttaaagttctctatgccgatacagacggtctccatgctaccattcccggagcagacgctgaaacagtcaagaaaaaagcaaaggagttcttaaaatacattaatccaaaactgcccggcctgctcgaacttgagtacgagggcttctacgtgaggggcttcttcgtcacgaagaagaagtacgctgtgatagacgaggagggcaagataaccacgaggggtcttgagattgtgaggcgcgactggagcgagatagcgaaggagacccaggccagggtcttagaggcgatactcaagcacggtgacgtcgaggaggccgttaggatagtcaaggaagtgacggaaaagctgagcaagtatgaggtcccgcccgagaagctggtaatccacgagcagataacgcgcgatttgagggattacaaagccaccggcccgcacgttgccgttgcgaagaggctcgcggcgcgtggagtgaaaatccggcccggcacggtgataagctacatcgtcctaaagggctctggaaggataggcgacagggcgattccagctgatgagttcgacccgacgaagcaccgctacgatgcggaatactacatcgagaaccaggttctcccggcggtggagaggattctaaaagccttcggctatcggaaggaggatttgcgctaccagaagacgaagcaggtcggctcgggcgcgtggctgaaggtgaaggggaagaagggtaccgaagcttacgtagaacaaaaactcatctcagaagaggatctgaatagcgccgtcgaccatcatcatcatcatcattga

SEQ ID NO: 436 - protein, 802 aa, Artificial Sequence
  Description of Artificial Sequence:Thermococcus species 9degreesN-7 mutant DNA polymerase, 9degreesN mutant
MILDTDYITENGKPVIRVFKKENGEFKIEYDRTFEPYFYALLKDDSAIEDVKKVTAKRHGTVVKVKRAEKVQKKFLGRPIEVWKLYFNHPQDVPAIRDRIRAHPAVVDIYEYDIPFAKRYLIDKGLIPMEGDEELTMLAFAIATLYHEGEEFGTGPILMISYADGSEARVITWKKIDLPYVDVVSTEKEMIKRFLRVVREKDPDVLITYNGDNFDFAYLKKRCEELGIKFTLGRDGSEPKIQRMGDRFAVEVKGRIHFDLYPVIRRTINLPTYTLEAVYEAVFGKPKEKVYAEEIAQAWESGEGLERVARYSMEDAKVTYELGREFFPMEAQLSRLIGQSLWDVSRSSTGNLVEWFLLRKAYKRNELAPNKPDERELARRRGGYAGGYVKEPERGLWDNIVYLDFRSWYPSIIITHNVSPDTLNREGCKEYDVAPEVGHKFCKDFPGFIPSLLGDLLEERVKIERKMKATVDPLEKKLLDYRMWLIKILANSFYGYYGYAKARWYCKECAESVTAWGREYIEMVIRELEEKFGFKVLYADTDGLHATIPGADAETVKKKAKEFLKYINPKLPGLLELEYEGFYVRGFFVTKKKYAVIDEEGKITTRGLEIVRRDWSEIAKETQARVLEAILKHGDVEEAVRIVKEVTEKLSKYEVPPEKLVIHEQITRDLRDYKATGPHVAVAKRLAARGVKIRPGTVISYIVLKGSGRIGDRAIPADEFDPTKHRYDAEYYIENQVLPAVERILKAFGYRKEDLRYQKTKQVGSGAWLKVKGKKGTEAYVEQKLISEEDLNSAVDHHHHHH

SEQ ID NO: 437 - DNA, 2409 bp, Artificial Sequence
  Description of Artificial Sequence:Thermococcus species 9degreesN-7 mutant DNA polymerase, 9degreesN mutant
atgattctcgataccgactacatcaccgagaacgggaagcccgtgataagggtcttcaagaaggagaacggcgagtttaaaatcgagtacgacagaaccttcgagccctacttctacgcccttctgaaggacgattctgcgatagaggacgtcaagaaggtaaccgcaaagaggcacggaacggttgtcaaggtgaagcgcgccgagaaggtgcagaagaagttcctcggcaggccgatagaggtctggaagctctacttcaaccatcctcaggacgtcccggcgattcgagacaggatacgcgcccaccccgctgtcgttgacatctacgagtacgacatacccttcgccaagcgctacctcatcgacaagggcctgattccgatggagggcgacgaggagcttacgatgctcgccttcgcgatcgcaaccctctatcacgagggcgaggagttcggaaccgggccgattctcatgataagctacgccgacgggagcgaggcgagggtgataacctggaagaagattgaccttccgtacgttgacgtcgtctcgaccgagaaggagatgattaagcgcttcctccgcgtcgtcagggagaaggaccccgacgtgctcatcacctacaacggcgacaacttcgacttcgcctacctgaagaagcgctgtgaggaactcggaataaagttcacactcggcagggacgggagcgagccgaagatacagcgaatgggcgaccgctttgccgttgaggtgaagggcaggattcacttcgacctctaccccgtcataaggcgcacgataaacctcccgacctacacccttgaggccgtttacgaggccgtctttggaaagcccaaggagaaggtttacgcagaggagatagcgcaggcctgggagagcggggagggccttgaaagggttgcaagatactcgatggaggacgctaaggtgacctacgagctgggaagggagttcttcccgatggaggcccagctttcgaggcttataggccagagcctctgggacgtctcgcgctcgagcaccggaaatttggtggagtggttcctcctgcggaaggcctacaagaggaacgagctcgccccaaacaagcccgacgagagggagctcgcgagacggcgcgggggctacgctggcgggtacgttaaggaaccagagcggggattgtgggacaacattgtgtatttagacttccgctcgtggtatccttcaatcatcataacccacaacgtctcgccggataccctcaaccgcgagggctgtaaagagtacgacgtcgcccctgaggttggacacaagttctgcaaggacttccccggcttcataccaagcctcctgggagatttgctcgaggagagggacaagatagagcggaagatgaaggcaacggttgacccgctggagaagaaactcctcgattacaggatgtggcttataaaaatcctcgccaacagcttctacggctactacggctacgccaaggcccggtggtactgcaaggagtgcgccgagagcgttacggcctggggaagggagtatatagaaatggttatccgggaactcgaagaaaaattcggttttaaagttctctatgccgatacagacggtctccatgctaccattcccggagcagacgctgaaacagtcaagaaaaaagcaaaggagttcttaaaatacattaatccaaaactgcccggcctgctcgaacttgagtacgagggcttctacgtgaggggcttcttcgtcacgaagaagaagtacgctgtgatagacgaggagggcaagataaccacgaggggtcttgagattgtgaggcgcgactggagcgagatagcgaaggagacccaggccagggtcttagaggcgatactcaagcacggtgacgtcgaggaggccgttaggatagtcaaggaagtgacggaaaagctgagcaagtatgaggtcccgcccgagaagctggtaatccacgagcagataacgcgcgatttgagggattacaaagccaccggcccgcacgttgccgttgcgaagaggctcgcggcgcgtggagtgaaaatccggcccggcacggtgataagctacatcgtcctaaagggctctggaaggataggcgacagggcgattccagctgatgagttcgacccgacgaagcaccgctacgatgcggaatactacatcgagaaccaggttctcccggcggtggagaggattctaaaagccttcggctatcggaaggaggatttgcgctaccagaagacgaagcaggtcggctcgggcgcgtggctgaaggtgaaggggaagaagggtaccgaagcttacgtagaacaaaaactcatctcagaagaggatctgaatagcgccgtcgaccatcatcatcatcatcattga

SEQ ID NO: 438 - protein, 802 aa, Artificial Sequence
  Description of Artificial Sequence:Thermococcus species 9degreesN-7 mutant DNA polymerase, 9degreesN mutant
MILDTDYITENGKPVIRVFKKENGEFKIEYDRTFEPYFYALLKDDSAIEDVKKVTAKRHGTVVKVKRAEKVQKKFLGRPIEVWKLYFNHPQDVPAIRDRIRAHPAVVDIYEYDIPFAKRYLIDKGLIPMEGDEELTMLAFAIATLYHEGEEFGTGPILMISYADGSEARVITWKKIDLPYVDVVSTEKEMIKRFLRVVREKDPDVLITYNGDNFDFAYLKKRCEELGIKFTLGRDGSEPKIQRMGDRFAVEVKGRIHFDLYPVIRRTINLPTYTLEAVYEAVFGKPKEKVYAEEIAQAWESGEGLERVARYSMEDAKVTYELGREFFPMEAQLSRLIGQSLWDVSRSSTGNLVEWFLLRKAYKRNELAPNKPDERELARRRGGYAGGYVKEPERGLWDNIVYLDFRSWYPSIIITHNVSPDTLNREGCKEYDVAPEVGHKFCKDFPGFIPSLLGDLLEERDKIERKMKATVDPLEKKLLDYRMWLIKILANSFYGYYGYAKARWYCKECAESVTAWGREYIEMVIRELEEKFGFKVLYADTDGLHATIPGADAETVKKKAKEFLKYINPKLPGLLELEYEGFYVRGFFVTKKKYAVIDEEGKITTRGLEIVRRDWSEIAKETQARVLEAILKHGDVEEAVRIVKEVTEKLSKYEVPPEKLVIHEQITRDLRDYKATGPHVAVAKRLAARGVKIRPGTVISYIVLKGSGRIGDRAIPADEFDPTKHRYDAEYYIENQVLPAVERILKAFGYRKEDLRYQKTKQVGSGAWLKVKGKKGTEAYVEQKLISEEDLNSAVDHHHHHH

SEQ ID NO: 439 - DNA, 2409 bp, Artificial Sequence
  Description of Artificial Sequence:Thermococcus species 9degreesN-7 mutant DNA polymerase, 9degreesN mutant
atgattctcgataccgactacatcaccgagaacgggaagcccgtgataagggtcttcaagaaggagaacggcgagtttaaaatcgagtacgacagaaccttcgagccctacttctacgcccttctgaaggacgattctgcgatagaggacgtcaagaaggtaaccgcaaagaggcacggaacggttgtcaaggtgaagcgcgccgagaaggtgcagaagaagttcctcggcaggccgatagaggtctggaagctctacttcaaccatcctcaggacgtcccggcgattcgagacaggatacgcgcccaccccgctgtcgttgacatctacgagtacgacatacccttcgccaagcgctacctcatcgacaagggcctgattccgatggagggcgacgaggagcttacgatgctcgccttcgcgatcgcaaccctctatcacgagggcgaggagttcggaaccgggccgattctcatgataagctacgccgacgggagcgaggcgagggtgataacctggaagaagattgaccttccgtacgttgacgtcgtctcgaccgagaaggagatgattaagcgcttcctccgcgtcgtcagggagaaggaccccgacgtgctcatcacctacaacggcgacaacttcgacttcgcctacctgaagaagcgctgtgaggaactcggaataaagttcacactcggcagggacgggagcgagccgaagatacagcgaatgggcgaccgctttgccgttgaggtgaagggcaggattcacttcgacctctaccccgtcataaggcgcacgataaacctcccgacctacacccttgaggccgtttacgaggccgtctttggaaagcccaaggagaaggtttacgcagaggagatagcgcaggcctgggagagcggggagggccttgaaagggttgcaagatactcgatggaggacgctaaggtgacctacgagctgggaagggagttcttcccgatggaggcccagctttcgaggcttataggccagagcctctgggacgtctcgcgctcgagcaccggaaatttggtggagtggttcctcctgcggaaggcctacaagaggaacgagctcgccccaaacaagcccgacgagagggagctcgcgagacggcgcgggggctacgctggcgggtacgttaaggaaccagagcggggattgtgggacaacattgtgtatttagacttccgctcgtggtatccttcaatcatcataacccacaacgtctcgccggataccctcaaccgcgagggctgtaaagagtacgacgtcgcccctgaggttggacacaagttctgcaaggacttccccggcttcataccaagcctcctgggagatttgctcgaggagggtcagaagatagagcggaagatgaaggcaacggttgacccgctggagaagaaactcctcgattacaggatgtggcttataaaaatcctcgccaacagcttctacggctactacggctacgccaaggcccggtggtactgcaaggagtgcgccgagagcgttacggcctggggaagggagtatatagaaatggttatccgggaactcgaagaaaaattcggttttaaagttctctatgccgatacagacggtctccatgctaccattcccggagcagacgctgaaacagtcaagaaaaaagcaaaggagttcttaaaatacattaatccaaaactgcccggcctgctcgaacttgagtacgagggcttctacgtgaggggcttcttcgtcacgaagaagaagtacgctgtgatagacgaggagggcaagataaccacgaggggtcttgagattgtgaggcgcgactggagcgagatagcgaaggagacccaggccagggtcttagaggcgatactcaagcacggtgacgtcgaggaggccgttaggatagtcaaggaagtgacggaaaagctgagcaagtatgaggtcccgcccgagaagctggtaatccacgagcagataacgcgcgatttgagggattacaaagccaccggcccgcacgttgccgttgcgaagaggctcgcggcgcgtggagtgaaaatccggcccggcacggtgataagctacatcgtcctaaagggctctggaaggataggcgacagggcgattccagctgatgagttcgacccgacgaagcaccgctacgatgcggaatactacatcgagaaccaggttctcccggcggtggagaggattctaaaagccttcggctatcggaaggaggatttgcgctaccagaagacgaagcaggtcggctcgggcgcgtggctgaaggtgaaggggaagaagggtaccgaagcttacgtagaacaaaaactcatctcagaagaggatctgaatagcgccgtcgaccatcatcatcatcatcattga

SEQ ID NO: 440 - protein, 802 aa, Artificial Sequence
  Description of Artificial Sequence:Thermococcus species 9degreesN-7 mutant DNA polymerase, 9degreesN mutant
MILDTDYITENGKPVIRVFKKENGEFKIEYDRTFEPYFYALLKDDSAIEDVKKVTAKRHGTVVKVKRAEKVQKKFLGRPIEVWKLYFNHPQDVPAIRDRIRAHPAVVDIYEYDIPFAKRYLIDKGLIPMEGDEELTMLAFAIATLYHEGEEFGTGPILMISYADGSEARVITWKKIDLPYVDVVSTEKEMIKRFLRVVREKDPDVLITYNGDNFDFAYLKKRCEELGIKFTLGRDGSEPKIQRMGDRFAVEVKGRIHFDLYPVIRRTINLPTYTLEAVYEAVFGKPKEKVYAEEIAQAWESGEGLERVARYSMEDAKVTYELGREFFPMEAQLSRLIGQSLWDVSRSSTGNLVEWFLLRKAYKRNELAPNKPDERELARRRGGYAGGYVKEPERGLWDNIVYLDFRSWYPSIIITHNVSPDTLNREGCKEYDVAPEVGHKFCKDFPGFIPSLLGDLLEEGQKIERKMKATVDPLEKKLLDYRMWLIKILANSFYGYYGYAKARWYCKECAESVTAWGREYIEMVIRELEEKFGFKVLYADTDGLHATIPGADAETVKKKAKEFLKYINPKLPGLLELEYEGFYVRGFFVTKKKYAVIDEEGKITTRGLEIVRRDWSEIAKETQARVLEAILKHGDVEEAVRIVKEVTEKLSKYEVPPEKLVIHEQITRDLRDYKATGPHVAVAKRLAARGVKIRPGTVISYIVLKGSGRIGDRAIPADEFDPTKHRYDAEYYIENQVLPAVERILKAFGYRKEDLRYQKTKQVGSGAWLKVKGKKGTEAYVEQKLISEEDLNSAVDHHHHHH

SEQ ID NO: 441 - DNA, 2409 bp, Artificial Sequence
  Description of Artificial Sequence:Thermococcus species 9degreesN-7 mutant DNA polymerase, 9degreesN mutant
atgattctcgataccgactacatcaccgagaacgggaagcccgtgataagggtcttcaagaaggagaacggcgagtttaaaatcgagtacgacagaaccttcgagccctacttctacgcccttctgaaggacgattctgcgatagaggacgtcaagaaggtaaccgcaaagaggcacggaacggttgtcaaggtgaagcgcgccgagaaggtgcagaagaagttcctcggcaggccgatagaggtctggaagctctacttcaaccatcctcaggacgtcccggcgattcgagacaggatacgcgcccaccccgctgtcgttgacatctacgagtacgacatacccttcgccaagcgctacctcatcgacaagggcctgattccgatggagggcgacgaggagcttacgatgctcgccttcgcgatcgcaaccctctatcacgagggcgaggagttcggaaccgggccgattctcatgataagctacgccgacgggagcgaggcgagggtgataacctggaagaagattgaccttccgtacgttgacgtcgtctcgaccgagaaggagatgattaagcgcttcctccgcgtcgtcagggagaaggaccccgacgtgctcatcacctacaacggcgacaacttcgacttcgcctacctgaagaagcgctgtgaggaactcggaataaagttcacactcggcagggacgggagcgagccgaagatacagcgaatgggcgaccgctttgccgttgaggtgaagggcaggattcacttcgacctctaccccgtcataaggcgcacgataaacctcccgacctacacccttgaggccgtttacgaggccgtctttggaaagcccaaggagaaggtttacgcagaggagatagcgcaggcctgggagagcggggagggccttgaaagggttgcaagatactcgatggaggacgctaaggtgacctacgagctgggaagggagttcttcccgatggaggcccagctttcgaggcttataggccagagcctctgggacgtctcgcgctcgagcaccggaaatttggtggagtggttcctcctgcggaaggcctacaagaggaacgagctcgccccaaacaagcccgacgagagggagctcgcgagacggcgcgggggctacgctggcgggtacgttaaggaaccagagcggggattgtgggacaacattgtgtatttagacttccgctcgtggtatccttcaatcatcataacccacaacgtctcgccggataccctcaaccgcgagggctgtaaagagtacgacgtcgcccctgaggttggacacaagttctgcaaggacttccccggcttcataccaagcctcctgggagatttgctcgaggagccgcagaagatagagcggaagatgaaggcaacggttgacccgctggagaagaaactcctcgattacaggatgtggcttataaaaatcctcgccaacagcttctacggctactacggctacgccaaggcccggtggtactgcaaggagtgcgccgagagcgttacggcctggggaagggagtatatagaaatggttatccgggaactcgaagaaaaattcggttttaaagttctctatgccgatacagacggtctccatgctaccattcccggagcagacgctgaaacagtcaagaaaaaagcaaaggagttcttaaaatacattaatccaaaactgcccggcctgctcgaacttgagtacgagggcttctacgtgaggggcttcttcgtcacgaagaagaagtacgctgtgatagacgaggagggcaagataaccacgaggggtcttgagattgtgaggcgcgactggagcgagatagcgaaggagacccaggccagggtcttagaggcgatactcaagcacggtgacgtcgaggaggccgttaggatagtcaaggaagtgacggaaaagctgagcaagtatgaggtcccgcccgagaagctggtaatccacgagcagataacgcgcgatttgagggattacaaagccaccggcccgcacgttgccgttgcgaagaggctcgcggcgcgtggagtgaaaatccggcccggcacggtgataagctacatcgtcctaaagggctctggaaggataggcgacagggcgattccagctgatgagttcgacccgacgaagcaccgctacgatgcggaatactacatcgagaaccaggttctcccggcggtggagaggattctaaaagccttcggctatcggaaggaggatttgcgctaccagaagacgaagcaggtcggctcgggcgcgtggctgaaggtgaaggggaagaagggtaccgaagcttacgtagaacaaaaactcatctcagaagaggatctgaatagcgccgtcgaccatcatcatcatcatcattga

SEQ ID NO: 442 - protein, 802 aa, Artificial Sequence
  Description of Artificial Sequence:Thermococcus species 9degreesN-7 mutant DNA polymerase, 9degreesN mutant
MILDTDYITENGKPVIRVFKKENGEFKIEYDRTFEPYFYALLKDDSAIEDVKKVTAKRHGTVVKVKRAEKVQKKFLGRPIEVWKLYFNHPQDVPAIRDRIRAHPAVVDIYEYDIPFAKRYLIDKGLIPMEGDEELTMLAFAIATLYHEGEEFGTGPILMISYADGSEARVITWKKIDLPYVDVVSTEKEMIKRFLRVVREKDPDVLITYNGDNFDFAYLKKRCEELGIKFTLGRDGSEPKIQRMGDRFAVEVKGRIHFDLYPVIRRTINLPTYTLEAVYEAVFGKPKEKVYAEEIAQAWESGEGLERVARYSMEDAKVTYELGREFFPMEAQLSRLIGQSLWDVSRSSTGNLVEWFLLRKAYKRNELAPNKPDERELARRRGGYAGGYVKEPERGLWDNIVYLDFRSWYPSIIITHNVSPDTLNREGCKEYDVAPEVGHKFCKDFPGFIPSLLGDLLEEPQKIERKMKATVDPLEKKLLDYRMWLIKILANSFYGYYGYAKARWYCKECAESVTAWGREYIEMVIRELEEKFGFKVLYADTDGLHATIPGADAETVKKKAKEFLKYINPKLPGLLELEYEGFYVRGFFVTKKKYAVIDEEGKITTRGLEIVRRDWSEIAKETQARVLEAILKHGDVEEAVRIVKEVTEKLSKYEVPPEKLVIHEQITRDLRDYKATGPHVAVAKRLAARGVKIRPGTVISYIVLKGSGRIGDRAIPADEFDPTKHRYDAEYYIENQVLPAVERILKAFGYRKEDLRYQKTKQVGSGAWLKVKGKKGTEAYVEQKLISEEDLNSAVDHHHHHH

SEQ ID NO: 443 - DNA, 2409 bp, Artificial Sequence
  Description of Artificial Sequence:Thermococcus species 9degreesN-7 mutant DNA polymerase, 9degreesN mutant
atgattctcgataccgactacatcaccgagaacgggaagcccgtgataagggtcttcaagaaggagaacggcgagtttaaaatcgagtacgacagaaccttcgagccctacttctacgcccttctgaaggacgattctgcgatagaggacgtcaagaaggtaaccgcaaagaggcacggaacggttgtcaaggtgaagcgcgccgagaaggtgcagaagaagttcctcggcaggccgatagaggtctggaagctctacttcaaccatcctcaggacgtcccggcgattcgagacaggatacgcgcccaccccgctgtcgttgacatctacgagtacgacatacccttcgccaagcgctacctcatcgacaagggcctgattccgatggagggcgacgaggagcttacgatgctcgccttcgcgatcgcaaccctctatcacgagggcgaggagttcggaaccgggccgattctcatgataagctacgccgacgggagcgaggcgagggtgataacctggaagaagattgaccttccgtacgttgacgtcgtctcgaccgagaaggagatgattaagcgcttcctccgcgtcgtcagggagaaggaccccgacgtgctcatcacctacaacggcgacaacttcgacttcgcctacctgaagaagcgctgtgaggaactcggaataaagttcacactcggcagggacgggagcgagccgaagatacagcgaatgggcgaccgctttgccgttgaggtgaagggcaggattcacttcgacctctaccccgtcataaggcgcacgataaacctcccgacctacacccttgaggccgtttacgaggccgtctttggaaagcccaaggagaaggtttacgcagaggagatagcgcaggcctgggagagcggggagggccttgaaagggttgcaagatactcgatggaggacgctaaggtgacctacgagctgggaagggagttcttcccgatggaggcccagctttcgaggcttataggccagagcctctgggacgtctcgcgctcgagcaccggaaatttggtggagtggttcctcctgcggaaggcctacaagaggaacgagctcgccccaaacaagcccgacgagagggagctcgcgagacggcgcgggggctacgctggcgggtacgttaaggaaccagagcggggattgtgggacaacattgtgtatttagacttccgctcgtggtatccttcaatcatcataacccacaacgtctcgccggataccctcaaccgcgagggctgtaaagagtacgacgtcgcccctgaggttggacacaagttctgcaaggacttccccggcttcataccaagcctcctgggagatttgctcgaggagaaacagaagatagagcggaagatgaaggcaacggttgacccgctggagaagaaactcctcgattacaggatgtggcttataaaaatcctcgccaacagcttctacggctactacggctacgccaaggcccggtggtactgcaaggagtgcgccgagagcgttacggcctggggaagggagtatatagaaatggttatccgggaactcgaagaaaaattcggttttaaagttctctatgccgatacagacggtctccatgctaccattcccggagcagacgctgaaacagtcaagaaaaaagcaaaggagttcttaaaatacattaatccaaaactgcccggcctgctcgaacttgagtacgagggcttctacgtgaggggcttcttcgtcacgaagaagaagtacgctgtgatagacgaggagggcaagataaccacgaggggtcttgagattgtgaggcgcgactggagcgagatagcgaaggagacccaggccagggtcttagaggcgatactcaagcacggtgacgtcgaggaggccgttaggatagtcaaggaagtgacggaaaagctgagcaagtatgaggtcccgcccgagaagctggtaatccacgagcagataacgcgcgatttgagggattacaaagccaccggcccgcacgttgccgttgcgaagaggctcgcggcgcgtggagtgaaaatccggcccggcacggtgataagctacatcgtcctaaagggctctggaaggataggcgacagggcgattccagctgatgagttcgacccgacgaagcaccgctacgatgcggaatactacatcgagaaccaggttctcccggcggtggagaggattctaaaagccttcggctatcggaaggaggatttgcgctaccagaagacgaagcaggtcggctcgggcgcgtggctgaaggtgaaggggaagaagggtaccgaagcttacgtagaacaaaaactcatctcagaagaggatctgaatagcgccgtcgaccatcatcatcatcatcattga

SEQ ID NO: 444 - protein, 802 aa, Artificial Sequence
  Description of Artificial Sequence:Thermococcus species 9degreesN-7 mutant DNA polymerase, 9degreesN mutant
MILDTDYITENGKPVIRVFKKENGEFKIEYDRTFEPYFYALLKDDSAIEDVKKVTAKRHGTVVKVKRAEKVQKKFLGRPIEVWKLYFNHPQDVPAIRDRIRAHPAVVDIYEYDIPFAKRYLIDKGLIPMEGDEELTMLAFAIATLYHEGEEFGTGPILMISYADGSEARVITWKKIDLPYVDVVSTEKEMIKRFLRVVREKDPDVLITYNGDNFDFAYLKKRCEELGIKFTLGRDGSEPKIQRMGDRFAVEVKGRIHFDLYPVIRRTINLPTYTLEAVYEAVFGKPKEKVYAEEIAQAWESGEGLERVARYSMEDAKVTYELGREFFPMEAQLSRLIGQSLWDVSRSSTGNLVEWFLLRKAYKRNELAPNKPDERELARRRGGYAGGYVKEPERGLWDNIVYLDFRSWYPSIIITHNVSPDTLNREGCKEYDVAPEVGHKFCKDFPGFIPSLLGDLLEEKQKIERKMKATVDPLEKKLLDYRMWLIKILANSFYGYYGYAKARWYCKECAESVTAWGREYIEMVIRELEEKFGFKVLYADTDGLHATIPGADAETVKKKAKEFLKYINPKLPGLLELEYEGFYVRGFFVTKKKYAVIDEEGKITTRGLEIVRRDWSEIAKETQARVLEAILKHGDVEEAVRIVKEVTEKLSKYEVPPEKLVIHEQITRDLRDYKATGPHVAVAKRLAARGVKIRPGTVISYIVLKGSGRIGDRAIPADEFDPTKHRYDAEYYIENQVLPAVERILKAFGYRKEDLRYQKTKQVGSGAWLKVKGKKGTEAYVEQKLISEEDLNSAVDHHHHHH

SEQ ID NO: 445 - DNA, 2409 bp, Artificial Sequence
  Description of Artificial Sequence:Thermococcus species 9degreesN-7 mutant DNA polymerase, 9degreesN mutant
atgattctcgataccgactacatcaccgagaacgggaagcccgtgataagggtcttcaagaaggagaacggcgagtttaaaatcgagtacgacagaaccttcgagccctacttctacgcccttctgaaggacgattctgcgatagaggacgtcaagaaggtaaccgcaaagaggcacggaacggttgtcaaggtgaagcgcgccgagaaggtgcagaagaagttcctcggcaggccgatagaggtctggaagctctacttcaaccatcctcaggacgtcccggcgattcgagacaggatacgcgcccaccccgctgtcgttgacatctacgagtacgacatacccttcgccaagcgctacctcatcgacaagggcctgattccgatggagggcgacgaggagcttacgatgctcgccttcgcgatcgcaaccctctatcacgagggcgaggagttcggaaccgggccgattctcatgataagctacgccgacgggagcgaggcgagggtgataacctggaagaagattgaccttccgtacgttgacgtcgtctcgaccgagaaggagatgattaagcgcttcctccgcgtcgtcagggagaaggaccccgacgtgctcatcacctacaacggcgacaacttcgacttcgcctacctgaagaagcgctgtgaggaactcggaataaagttcacactcggcagggacgggagcgagccgaagatacagcgaatgggcgaccgctttgccgttgaggtgaagggcaggattcacttcgacctctaccccgtcataaggcgcacgataaacctcccgacctacacccttgaggccgtttacgaggccgtctttggaaagcccaaggagaaggtttacgcagaggagatagcgcaggcctgggagagcggggagggccttgaaagggttgcaagatactcgatggaggacgctaaggtgacctacgagctgggaagggagttcttcccgatggaggcccagctttcgaggcttataggccagagcctctgggacgtctcgcgctcgagcaccggaaatttggtggagtggttcctcctgcggaaggcctacaagaggaacgagctcgccccaaacaagcccgacgagagggagctcgcgagacggcgcgggggctacgctggcgggtacgttaaggaaccagagcggggattgtgggacaacattgtgtatttagacttccgctcgtggtatccttcaatcatcataacccacaacgtctcgccggataccctcaaccgcgagggctgtaaagagtacgacgtcgcccctgaggttggacacaagttctgcaaggacttccccggcttcataccaagcctcctgggagatttgctcgaggagtctcagaagatagagcggaagatgaaggcaacggttgacccgctggagaagaaactcctcgattacaggatgtggcttataaaaatcctcgccaacagcttctacggctactacggctacgccaaggcccggtggtactgcaaggagtgcgccgagagcgttacggcctggggaagggagtatatagaaatggttatccgggaactcgaagaaaaattcggttttaaagttctctatgccgatacagacggtctccatgctaccattcccggagcagacgctgaaacagtcaagaaaaaagcaaaggagttcttaaaatacattaatccaaaactgcccggcctgctcgaacttgagtacgagggcttctacgtgaggggcttcttcgtcacgaagaagaagtacgctgtgatagacgaggagggcaagataaccacgaggggtcttgagattgtgaggcgcgactggagcgagatagcgaaggagacccaggccagggtcttagaggcgatactcaagcacggtgacgtcgaggaggccgttaggatagtcaaggaagtgacggaaaagctgagcaagtatgaggtcccgcccgagaagctggtaatccacgagcagataacgcgcgatttgagggattacaaagccaccggcccgcacgttgccgttgcgaagaggctcgcggcgcgtggagtgaaaatccggcccggcacggtgataagctacatcgtcctaaagggctctggaaggataggcgacagggcgattccagctgatgagttcgacccgacgaagcaccgctacgatgcggaatactacatcgagaaccaggttctcccggcggtggagaggattctaaaagccttcggctatcggaaggaggatttgcgctaccagaagacgaagcaggtcggctcgggcgcgtggctgaaggtgaaggggaagaagggtaccgaagcttacgtagaacaaaaactcatctcagaagaggatctgaatagcgccgtcgaccatcatcatcatcatcattga

SEQ ID NO: 446 - protein, 802 aa, Artificial Sequence
  Description of Artificial Sequence:Thermococcus species 9degreesN-7 mutant DNA polymerase, 9degreesN mutant
MILDTDYITENGKPVIRVFKKENGEFKIEYDRTFEPYFYALLKDDSAIEDVKKVTAKRHGTVVKVKRAEKVQKKFLGRPIEVWKLYFNHPQDVPAIRDRIRAHPAVVDIYEYDIPFAKRYLIDKGLIPMEGDEELTMLAFAIATLYHEGEEFGTGPILMISYADGSEARVITWKKIDLPYVDVVSTEKEMIKRFLRVVREKDPDVLITYNGDNFDFAYLKKRCEELGIKFTLGRDGSEPKIQRMGDRFAVEVKGRIHFDLYPVIRRTINLPTYTLEAVYEAVFGKPKEKVYAEEIAQAWESGEGLERVARYSMEDAKVTYELGREFFPMEAQLSRLIGQSLWDVSRSSTGNLVEWFLLRKAYKRNELAPNKPDERELARRRGGYAGGYVKEPERGLWDNIVYLDFRSWYPSIIITHNVSPDTLNREGCKEYDVAPEVGHKFCKDFPGFIPSLLGDLLEESQKIERKMKATVDPLEKKLLDYRMWLIKILANSFYGYYGYAKARWYCKECAESVTAWGREYIEMVIRELEEKFGFKVLYADTDGLHATIPGADAETVKKKAKEFLKYINPKLPGLLELEYEGFYVRGFFVTKKKYAVIDEEGKITTRGLEIVRRDWSEIAKETQARVLEAILKHGDVEEAVRIVKEVTEKLSKYEVPPEKLVIHEQITRDLRDYKATGPHVAVAKRLAARGVKIRPGTVISYIVLKGSGRIGDRAIPADEFDPTKHRYDAEYYIENQVLPAVERILKAFGYRKEDLRYQKTKQVGSGAWLKVKGKKGTEAYVEQKLISEEDLNSAVDHHHHHH

SEQ ID NO: 447 - DNA, 2409 bp, Artificial Sequence
  Description of Artificial Sequence:Thermococcus species 9degreesN-7 mutant DNA polymerase, 9degreesN mutant
atgattctcgataccgactacatcaccgagaacgggaagcccgtgataagggtcttcaagaaggagaacggcgagtttaaaatcgagtacgacagaaccttcgagccctacttctacgcccttctgaaggacgattctgcgatagaggacgtcaagaaggtaaccgcaaagaggcacggaacggttgtcaaggtgaagcgcgccgagaaggtgcagaagaagttcctcggcaggccgatagaggtctggaagctctacttcaaccatcctcaggacgtcccggcgattcgagacaggatacgcgcccaccccgctgtcgttgacatctacgagtacgacatacccttcgccaagcgctacctcatcgacaagggcctgattccgatggagggcgacgaggagcttacgatgctcgccttcgcgatcgcaaccctctatcacgagggcgaggagttcggaaccgggccgattctcatgataagctacgccgacgggagcgaggcgagggtgataacctggaagaagattgaccttccgtacgttgacgtcgtctcgaccgagaaggagatgattaagcgcttcctccgcgtcgtcagggagaaggaccccgacgtgctcatcacctacaacggcgacaacttcgacttcgcctacctgaagaagcgctgtgaggaactcggaataaagttcacactcggcagggacgggagcgagccgaagatacagcgaatgggcgaccgctttgccgttgaggtgaagggcaggattcacttcgacctctaccccgtcataaggcgcacgataaacctcccgacctacacccttgaggccgtttacgaggccgtctttggaaagcccaaggagaaggtttacgcagaggagatagcgcaggcctgggagagcggggagggccttgaaagggttgcaagatactcgatggaggacgctaaggtgacctacgagctgggaagggagttcttcccgatggaggcccagctttcgaggcttataggccagagcctctgggacgtctcgcgctcgagcaccggaaatttggtggagtggttcctcctgcggaaggcctacaagaggaacgagctcgccccaaacaagcccgacgagagggagctcgcgagacggcgcgggggctacgctggcgggtacgttaaggaaccagagcggggattgtgggacaacattgtgtatttagacttccgctcgtggtatccttcaatcatcataacccacaacgtctcgccggataccctcaaccgcgagggctgtaaagagtacgacgtcgcccctgaggttggacacaagttctgcaaggacttccccggcttcataccaagcctcctgggagatttgctcgaggagaggcagaagatagagcggaagatgaaggcaacggttgacccgctggagaagaaactcctcgattacaggatgtggcttataaaaatcctcgccaacagcttctacggctacagtggctacgccaaggcccggtggtactgcaaggagtgcgccgagagcgttacggcctggggaagggagtatatagaaatggttatccgggaactcgaagaaaaattcggttttaaagttctctatgccgatacagacggtctccatgctaccattcccggagcagacgctgaaacagtcaagaaaaaagcaaaggagttcttaaaatacattaatccaaaactgcccggcctgctcgaacttgagtacgagggcttctacgtgaggggcttcttcgtcacgaagaagaagtacgctgtgatagacgaggagggcaagataaccacgaggggtcttgagattgtgaggcgcgactggagcgagatagcgaaggagacccaggccagggtcttagaggcgatactcaagcacggtgacgtcgaggaggccgttaggatagtcaaggaagtgacggaaaagctgagcaagtatgaggtcccgcccgagaagctggtaatccacgagcagataacgcgcgatttgagggattacaaagccaccggcccgcacgttgccgttgcgaagaggctcgcggcgcgtggagtgaaaatccggcccggcacggtgataagctacatcgtcctaaagggctctggaaggataggcgacagggcgattccagctgatgagttcgacccgacgaagcaccgctacgatgcggaatactacatcgagaaccaggttctcccggcggtggagaggattctaaaagccttcggctatcggaaggaggatttgcgctaccagaagacgaagcaggtcggctcgggcgcgtggctgaaggtgaaggggaagaagggtaccgaagcttacgtagaacaaaaactcatctcagaagaggatctgaatagcgccgtcgaccatcatcatcatcatcattga

SEQ ID NO: 448 - protein, 802 aa, Artificial Sequence
  Description of Artificial Sequence:Thermococcus species 9degreesN-7 mutant DNA polymerase, 9degreesN mutant
MILDTDYITENGKPVIRVFKKENGEFKIEYDRTFEPYFYALLKDDSAIEDVKKVTAKRHGTVVKVKRAEKVQKKFLGRPIEVWKLYFNHPQDVPAIRDRIRAHPAVVDIYEYDIPFAKRYLIDKGLIPMEGDEELTMLAFAIATLYHEGEEFGTGPILMISYADGSEARVITWKKIDLPYVDVVSTEKEMIKRFLRVVREKDPDVLITYNGDNFDFAYLKKRCEELGIKFTLGRDGSEPKIQRMGDRFAVEVKGRIHFDLYPVIRRTINLPTYTLEAVYEAVFGKPKEKVYAEEIAQAWESGEGLERVARYSMEDAKVTYELGREFFPMEAQLSRLIGQSLWDVSRSSTGNLVEWFLLRKAYKRNELAPNKPDERELARRRGGYAGGYVKEPERGLWDNIVYLDFRSWYPSIIITHNVSPDTLNREGCKEYDVAPEVGHKFCKDFPGFIPSLLGDLLEERQKIERKMKATVDPLEKKLLDYRMWLIKILANSFYGYSGYAKARWYCKECAESVTAWGREYIEMVIRELEEKFGFKVLYADTDGLHATIPGADAETVKKKAKEFLKYINPKLPGLLELEYEGFYVRGFFVTKKKYAVIDEEGKITTRGLEIVRRDWSEIAKETQARVLEAILKHGDVEEAVRIVKEVTEKLSKYEVPPEKLVIHEQITRDLRDYKATGPHVAVAKRLAARGVKIRPGTVISYIVLKGSGRIGDRAIPADEFDPTKHRYDAEYYIENQVLPAVERILKAFGYRKEDLRYQKTKQVGSGAWLKVKGKKGTEAYVEQKLISEEDLNSAVDHHHHHH

SEQ ID NO: 449 - DNA, 2409 bp, Artificial Sequence
  Description of Artificial Sequence:Thermococcus species 9degreesN-7 mutant DNA polymerase, 9degreesN mutant
atgattctcgataccgactacatcaccgagaacgggaagcccgtgataagggtcttcaagaaggagaacggcgagtttaaaatcgagtacgacagaaccttcgagccctacttctacgcccttctgaaggacgattctgcgatagaggacgtcaagaaggtaaccgcaaagaggcacggaacggttgtcaaggtgaagcgcgccgagaaggtgcagaagaagttcctcggcaggccgatagaggtctggaagctctacttcaaccatcctcaggacgtcccggcgattcgagacaggatacgcgcccaccccgctgtcgttgacatctacgagtacgacatacccttcgccaagcgctacctcatcgacaagggcctgattccgatggagggcgacgaggagcttacgatgctcgccttcgcgatcgcaaccctctatcacgagggcgaggagttcggaaccgggccgattctcatgataagctacgccgacgggagcgaggcgagggtgataacctggaagaagattgaccttccgtacgttgacgtcgtctcgaccgagaaggagatgattaagcgcttcctccgcgtcgtcagggagaaggaccccgacgtgctcatcacctacaacggcgacaacttcgacttcgcctacctgaagaagcgctgtgaggaactcggaataaagttcacactcggcagggacgggagcgagccgaagatacagcgaatgggcgaccgctttgccgttgaggtgaagggcaggattcacttcgacctctaccccgtcataaggcgcacgataaacctcccgacctacacccttgaggccgtttacgaggccgtctttggaaagcccaaggagaaggtttacgcagaggagatagcgcaggcctgggagagcggggagggccttgaaagggttgcaagatactcgatggaggacgctaaggtgacctacgagctgggaagggagttcttcccgatggaggcccagctttcgaggcttataggccagagcctctgggacgtctcgcgctcgagcaccggaaatttggtggagtggttcctcctgcggaaggcctacaagaggaacgagctcgccccaaacaagcccgacgagagggagctcgcgagacggcgcgggggctacgctggcgggtacgttaaggaaccagagcggggattgtgggacaacattgtgtatttagacttccgctcgtggtatccttcaatcatcataacccacaacgtctcgccggataccctcaaccgcgagggctgtaaagagtacgacgtcgcccctgaggttggacacaagttctgcaaggacttccccggcttcataccaagcctcctgggagatttgctcgaggagaggcagaagatagagcggaagatgaaggcaacggttgacccgctggagaagaaactcctcgattacaggatgtggcttataaaaatcctcgccaacagcttctacggctacacaggctacgccaaggcccggtggtactgcaaggagtgcgccgagagcgttacggcctggggaagggagtatatagaaatggttatccgggaactcgaagaaaaattcggttttaaagttctctatgccgatacagacggtctccatgctaccattcccggagcagacgctgaaacagtcaagaaaaaagcaaaggagttcttaaaatacattaatccaaaactgcccggcctgctcgaacttgagtacgagggcttctacgtgaggggcttcttcgtcacgaagaagaagtacgctgtgatagacgaggagggcaagataaccacgaggggtcttgagattgtgaggcgcgactggagcgagatagcgaaggagacccaggccagggtcttagaggcgatactcaagcacggtgacgtcgaggaggccgttaggatagtcaaggaagtgacggaaaagctgagcaagtatgaggtcccgcccgagaagctggtaatccacgagcagataacgcgcgatttgagggattacaaagccaccggcccgcacgttgccgttgcgaagaggctcgcggcgcgtggagtgaaaatccggcccggcacggtgataagctacatcgtcctaaagggctctggaaggataggcgacagggcgattccagctgatgagttcgacccgacgaagcaccgctacgatgcggaatactacatcgagaaccaggttctcccggcggtggagaggattctaaaagccttcggctatcggaaggaggatttgcgctaccagaagacgaagcaggtcggctcgggcgcgtggctgaaggtgaaggggaagaagggtaccgaagcttacgtagaacaaaaactcatctcagaagaggatctgaatagcgccgtcgaccatcatcatcatcatcattga

SEQ ID NO: 450 - protein, 802 aa, Artificial Sequence
  Description of Artificial Sequence:Thermococcus species 9degreesN-7 mutant DNA polymerase, 9degreesN mutant
MILDTDYITENGKPVIRVFKKENGEFKIEYDRTFEPYFYALLKDDSAIEDVKKVTAKRHGTVVKVKRAEKVQKKFLGRPIEVWKLYFNHPQDVPAIRDRIRAHPAVVDIYEYDIPFAKRYLIDKGLIPMEGDEELTMLAFAIATLYHEGEEFGTGPILMISYADGSEARVITWKKIDLPYVDVVSTEKEMIKRFLRVVREKDPDVLITYNGDNFDFAYLKKRCEELGIKFTLGRDGSEPKIQRMGDRFAVEVKGRIHFDLYPVIRRTINLPTYTLEAVYEAVFGKPKEKVYAEEIAQAWESGEGLERVARYSMEDAKVTYELGREFFPMEAQLSRLIGQSLWDVSRSSTGNLVEWFLLRKAYKRNELAPNKPDERELARRRGGYAGGYVKEPERGLWDNIVYLDFRSWYPSIIITHNVSPDTLNREGCKEYDVAPEVGHKFCKDFPGFIPSLLGDLLEERQKIERKMKATVDPLEKKLLDYRMWLIKILANSFYGYTGYAKARWYCKECAESVTAWGREYIEMVIRELEEKFGFKVLYADTDGLHATIPGADAETVKKKAKEFLKYINPKLPGLLELEYEGFYVRGFFVTKKKYAVIDEEGKITTRGLEIVRRDWSEIAKETQARVLEAILKHGDVEEAVRIVKEVTEKLSKYEVPPEKLVIHEQITRDLRDYKATGPHVAVAKRLAARGVKIRPGTVISYIVLKGSGRIGDRAIPADEFDPTKHRYDAEYYIENQVLPAVERILKAFGYRKEDLRYQKTKQVGSGAWLKVKGKKGTEAYVEQKLISEEDLNSAVDHHHHHH

SEQ ID NO: 451 - DNA, 2409 bp, Artificial Sequence
  Description of Artificial Sequence:Thermococcus species 9degreesN-7 mutant DNA polymerase, 9degreesN mutant
atgattctcgataccgactacatcaccgagaacgggaagcccgtgataagggtcttcaagaaggagaacggcgagtttaaaatcgagtacgacagaaccttcgagccctacttctacgcccttctgaaggacgattctgcgatagaggacgtcaagaaggtaaccgcaaagaggcacggaacggttgtcaaggtgaagcgcgccgagaaggtgcagaagaagttcctcggcaggccgatagaggtctggaagctctacttcaaccatcctcaggacgtcccggcgattcgagacaggatacgcgcccaccccgctgtcgttgacatctacgagtacgacatacccttcgccaagcgctacctcatcgacaagggcctgattccgatggagggcgacgaggagcttacgatgctcgccttcgcgatcgcaaccctctatcacgagggcgaggagttcggaaccgggccgattctcatgataagctacgccgacgggagcgaggcgagggtgataacctggaagaagattgaccttccgtacgttgacgtcgtctcgaccgagaaggagatgattaagcgcttcctccgcgtcgtcagggagaaggaccccgacgtgctcatcacctacaacggcgacaacttcgacttcgcctacctgaagaagcgctgtgaggaactcggaataaagttcacactcggcagggacgggagcgagccgaagatacagcgaatgggcgaccgctttgccgttgaggtgaagggcaggattcacttcgacctctaccccgtcataaggcgcacgataaacctcccgacctacacccttgaggccgtttacgaggccgtctttggaaagcccaaggagaaggtttacgcagaggagatagcgcaggcctgggagagcggggagggccttgaaagggttgcaagatactcgatggaggacgctaaggtgacctacgagctgggaagggagttcttcccgatggaggcccagctttcgaggcttataggccagagcctctgggacgtctcgcgctcgagcaccggaaatttggtggaggcattcctcctgcggaaggcctacaagaggaacgagctcgccccaaacaagcccgacgagagggagctcgcgagacggcgcgggggctacgctggcgggtacgttaaggaaccagagcggggattgtgggacaacattgtgtatttagacttccgctcgtggtatccttcaatcatcataacccacaacgtctcgccggataccctcaaccgcgagggctgtaaagagtacgacgtcgcccctgaggttggacacaagttctgcaaggacttccccggcttcataccaagcctcctgggagatttgctcgaggagaggcagaagatagagcggaagatgaaggcaacggttgacccgctggagaagaaactcctcgtgtacaggcagtggcttataaaaatcctcgccaacagcctttacggctactacggctacgccaaggcccggtggtactgcaaggagtgcgccgagagcgttacggcctggggaagggagtatatagaaatggttatccgggaactcgaagaaaaattcggttttaaagttctctatgccgatacagacggtctccatgctaccattcccggagcagacgctgaaacagtcaagaaaaaagcaaaggagttcttaaaatacattaatccaaaactgcccggcctgctcgaacttgagtacgagggcttctacgtgaggggcttcttcgtcacgaagaagaagtacgctgtgatagacgaggagggcaagataaccacgaggggtcttgagattgtgaggcgcgactggagcgagatagcgaaggagacccaggccagggtcttagaggcgatactcaagcacggtgacgtcgaggaggccgttaggatagtcaaggaagtgacggaaaagctgagcaagtatgaggtcccgcccgagaagctggtaatccacgagcagataacgcgcgatttgagggattacaaagccaccggcccgcacgttgccgttgcgaagaggctcgcggcgcgtggagtgaaaatccggcccggcacggtgataagctacatcgtcctaaagggctctggaaggataggcgacagggcgattccagctgatgagttcgacccgacgaagcaccgctacgatgcggaatactacatcgagaaccaggttctcccggcggtggagaggattctaaaagccttcggctatcggaaggaggatttgcgctaccagaagacgaagcaggtcggctcgggcgcgtggctgaaggtgaaggggaagaagggtaccgaagcttacgtagaacaaaaactcatctcagaagaggatctgaatagcgccgtcgaccatcatcatcatcatcattga

SEQ ID NO: 452 - protein, 802 aa, Artificial Sequence
  Description of Artificial Sequence:Thermococcus species 9degreesN-7 mutant DNA polymerase, 9degreesN mutant
MILDTDYITENGKPVIRVFKKENGEFKIEYDRTFEPYFYALLKDDSAIEDVKKVTAKRHGTVVKVKRAEKVQKKFLGRPIEVWKLYFNHPQDVPAIRDRIRAHPAVVDIYEYDIPFAKRYLIDKGLIPMEGDEELTMLAFAIATLYHEGEEFGTGPILMISYADGSEARVITWKKIDLPYVDVVSTEKEMIKRFLRVVREKDPDVLITYNGDNFDFAYLKKRCEELGIKFTLGRDGSEPKIQRMGDRFAVEVKGRIHFDLYPVIRRTINLPTYTLEAVYEAVFGKPKEKVYAEEIAQAWESGEGLERVARYSMEDAKVTYELGREFFPMEAQLSRLIGQSLWDVSRSSTGNLVEAFLLRKAYKRNELAPNKPDERELARRRGGYAGGYVKEPERGLWDNIVYLDFRSWYPSIIITHNVSPDTLNREGCKEYDVAPEVGHKFCKDFPGFIPSLLGDLLEERQKIERKMKATVDPLEKKLLVYRQWLIKILANSLYGYYGYAKARWYCKECAESVTAWGREYIEMVIRELEEKFGFKVLYADTDGLHATIPGADAETVKKKAKEFLKYINPKLPGLLELEYEGFYVRGFFVTKKKYAVIDEEGKITTRGLEIVRRDWSEIAKETQARVLEAILKHGDVEEAVRIVKEVTEKLSKYEVPPEKLVIHEQITRDLRDYKATGPHVAVAKRLAARGVKIRPGTVISYIVLKGSGRIGDRAIPADEFDPTKHRYDAEYYIENQVLPAVERILKAFGYRKEDLRYQKTKQVGSGAWLKVKGKKGTEAYVEQKLISEEDLNSAVDHHHHHH

SEQ ID NO: 453 - DNA, 2409 bp, Artificial Sequence
  Description of Artificial Sequence:Thermococcus species 9degreesN-7 mutant DNA polymerase, 9degreesN mutant
atgattctcgataccgactacatcaccgagaacgggaagcccgtgataagggtcttcaagaaggagaacggcgagtttaaaatcgagtacgacagaaccttcgagccctacttctacgcccttctgaaggacgattctgcgatagaggacgtcaagaaggtaaccgcaaagaggcacggaacggttgtcaaggtgaagcgcgccgagaaggtgcagaagaagttcctcggcaggccgatagaggtctggaagctctacttcaaccatcctcaggacgtcccggcgattcgagacaggatacgcgcccaccccgctgtcgttgacatctacgagtacgacatacccttcgccaagcgctacctcatcgacaagggcctgattccgatggagggcgacgaggagcttacgatgctcgccttcgcgatcgcaaccctctatcacgagggcgaggagttcggaaccgggccgattctcatgataagctacgccgacgggagcgaggcgagggtgataacctggaagaagattgaccttccgtacgttgacgtcgtctcgaccgagaaggagatgattaagcgcttcctccgcgtcgtcagggagaaggaccccgacgtgctcatcacctacaacggcgacaacttcgacttcgcctacctgaagaagcgctgtgaggaactcggaataaagttcacactcggcagggacgggagcgagccgaagatacagcgaatgggcgaccgctttgccgttgaggtgaagggcaggattcacttcgacctctaccccgtcataaggcgcacgataaacctcccgacctacacccttgaggccgtttacgaggccgtctttggaaagcccaaggagaaggtttacgcagaggagatagcgcaggcctgggagagcggggagggccttgaaagggttgcaagatactcgatggaggacgctaaggtgacctacgagctgggaagggagttcttcccgatggaggcccagctttcgaggcttataggccagagcctctgggacgtctcgcgctcgagcaccggaaatttggtggaggcattcctcctgcggaaggcctacaagaggaacgagctcgccccaaacaagcccgacgagagggagctcgcgagacggcgcgggggctacgctggcgggtacgttaaggaaccagagcggggattgtgggacaacattgtgtatttagacttccgctcgtggtatccttcaatcatcataacccacaacgtctcgccggataccctcaaccgcgagggctgtaaagagtacgacgtcgcccctgaggttggacacaagttctgcaaggacttccccggcttcataccaagcctcctgggagatttgctcgaggagaggcagaagatagagcggaagatgaaggcaacggttgacccgctggagaagaaactcctcgtgtacaggcagtggcttataaaaatcctcgccaacagctgttacggctactacggctacgccaaggcccggtggtactgcaaggagtgcgccgagagcgttacggcctggggaagggagtatatagaaatggttatccgggaactcgaagaaaaattcggttttaaagttctctatgccgatacagacggtctccatgctaccattcccggagcagacgctgaaacagtcaagaaaaaagcaaaggagttcttaaaatacattaatccaaaactgcccggcctgctcgaacttgagtacgagggcttctacgtgaggggcttcttcgtcacgaagaagaagtacgctgtgatagacgaggagggcaagataaccacgaggggtcttgagattgtgaggcgcgactggagcgagatagcgaaggagacccaggccagggtcttagaggcgatactcaagcacggtgacgtcgaggaggccgttaggatagtcaaggaagtgacggaaaagctgagcaagtatgaggtcccgcccgagaagctggtaatccacgagcagataacgcgcgatttgagggattacaaagccaccggcccgcacgttgccgttgcgaagaggctcgcggcgcgtggagtgaaaatccggcccggcacggtgataagctacatcgtcctaaagggctctggaaggataggcgacagggcgattccagctgatgagttcgacccgacgaagcaccgctacgatgcggaatactacatcgagaaccaggttctcccggcggtggagaggattctaaaagccttcggctatcggaaggaggatttgcgctaccagaagacgaagcaggtcggctcgggcgcgtggctgaaggtgaaggggaagaagggtaccgaagcttacgtagaacaaaaactcatctcagaagaggatctgaatagcgccgtcgaccatcatcatcatcatcattga

SEQ ID NO: 454 - protein, 802 aa, Artificial Sequence
  Description of Artificial Sequence:Thermococcus species 9degreesN-7 mutant DNA polymerase, 9degreesN mutant
MILDTDYITENGKPVIRVFKKENGEFKIEYDRTFEPYFYALLKDDSAIEDVKKVTAKRHGTVVKVKRAEKVQKKFLGRPIEVWKLYFNHPQDVPAIRDRIRAHPAVVDIYEYDIPFAKRYLIDKGLIPMEGDEELTMLAFAIATLYHEGEEFGTGPILMISYADGSEARVITWKKIDLPYVDVVSTEKEMIKRFLRVVREKDPDVLITYNGDNFDFAYLKKRCEELGIKFTLGRDGSEPKIQRMGDRFAVEVKGRIHFDLYPVIRRTINLPTYTLEAVYEAVFGKPKEKVYAEEIAQAWESGEGLERVARYSMEDAKVTYELGREFFPMEAQLSRLIGQSLWDVSRSSTGNLVEAFLLRKAYKRNELAPNKPDERELARRRGGYAGGYVKEPERGLWDNIVYLDFRSWYPSIIITHNVSPDTLNREGCKEYDVAPEVGHKFCKDFPGFIPSLLGDLLEERQKIERKMKATVDPLEKKLLVYRQWLIKILANSCYGYYGYAKARWYCKECAESVTAWGREYIEMVIRELEEKFGFKVLYADTDGLHATIPGADAETVKKKAKEFLKYINPKLPGLLELEYEGFYVRGFFVTKKKYAVIDEEGKITTRGLEIVRRDWSEIAKETQARVLEAILKHGDVEEAVRIVKEVTEKLSKYEVPPEKLVIHEQITRDLRDYKATGPHVAVAKRLAARGVKIRPGTVISYIVLKGSGRIGDRAIPADEFDPTKHRYDAEYYIENQVLPAVERILKAFGYRKEDLRYQKTKQVGSGAWLKVKGKKGTEAYVEQKLISEEDLNSAVDHHHHHH

SEQ ID NO: 455 - DNA, 2409 bp, Artificial Sequence
  Description of Artificial Sequence:Thermococcus species 9degreesN-7 mutant DNA polymerase, 9degreesN mutant
atgattctcgataccgactacatcaccgagaacgggaagcccgtgataagggtcttcaagaaggagaacggcgagtttaaaatcgagtacgacagaaccttcgagccctacttctacgcccttctgaaggacgattctgcgatagaggacgtcaagaaggtaaccgcaaagaggcacggaacggttgtcaaggtgaagcgcgccgagaaggtgcagaagaagttcctcggcaggccgatagaggtctggaagctctacttcaaccatcctcaggacgtcccggcgattcgagacaggatacgcgcccaccccgctgtcgttgacatctacgagtacgacatacccttcgccaagcgctacctcatcgacaagggcctgattccgatggagggcgacgaggagcttacgatgctcgccttcgcgatcgcaaccctctatcacgagggcgaggagttcggaaccgggccgattctcatgataagctacgccgacgggagcgaggcgagggtgataacctggaagaagattgaccttccgtacgttgacgtcgtctcgaccgagaaggagatgattaagcgcttcctccgcgtcgtcagggagaaggaccccgacgtgctcatcacctacaacggcgacaacttcgacttcgcctacctgaagaagcgctgtgaggaactcggaataaagttcacactcggcagggacgggagcgagccgaagatacagcgaatgggcgaccgctttgccgttgaggtgaagggcaggattcacttcgacctctaccccgtcataaggcgcacgataaacctcccgacctacacccttgaggccgtttacgaggccgtctttggaaagcccaaggagaaggtttacgcagaggagatagcgcaggcctgggagagcggggagggccttgaaagggttgcaagatactcgatggaggacgctaaggtgacctacgagctgggaagggagttcttcccgatggaggcccagctttcgaggcttataggccagagcctctgggacgtctcgcgctcgagcaccggaaatttggtggaggcattcctcctgcggaaggcctacaagaggaacgagctcgccccaaacaagcccgacgagagggagctcgcgagacggcgcgggggctacgctggcgggtacgttaaggaaccagagcggggattgtgggacaacattgtgtatttagacttccgctcgtggtatccttcaatcatcataacccacaacgtctcgccggataccctcaaccgcgagggctgtaaagagtacgacgtcgcccctgaggttggacacaagttctgcaaggacttccccggcttcataccaagcctcctgggagatttgctcgaggagaggcagaagatagagcggaagatgaaggcaacggttgacccgctggagaagaaactcctcgtgtacaggcagtggcttataaaaatcctcgccaacagcatctacggctactacggctacgccaaggcccggtggtactgcaaggagtgcgccgagagcgttacggcctggggaagggagtatatagaaatggttatccgggaactcgaagaaaaattcggttttaaagttctctatgccgatacagacggtctccatgctaccattcccggagcagacgctgaaacagtcaagaaaaaagcaaaggagttcttaaaatacattaatccaaaactgcccggcctgctcgaacttgagtacgagggcttctacgtgaggggcttcttcgtcacgaagaagaagtacgctgtgatagacgaggagggcaagataaccacgaggggtcttgagattgtgaggcgcgactggagcgagatagcgaaggagacccaggccagggtcttagaggcgatactcaagcacggtgacgtcgaggaggccgttaggatagtcaaggaagtgacggaaaagctgagcaagtatgaggtcccgcccgagaagctggtaatccacgagcagataacgcgcgatttgagggattacaaagccaccggcccgcacgttgccgttgcgaagaggctcgcggcgcgtggagtgaaaatccggcccggcacggtgataagctacatcgtcctaaagggctctggaaggataggcgacagggcgattccagctgatgagttcgacccgacgaagcaccgctacgatgcggaatactacatcgagaaccaggttctcccggcggtggagaggattctaaaagccttcggctatcggaaggaggatttgcgctaccagaagacgaagcaggtcggctcgggcgcgtggctgaaggtgaaggggaagaagggtaccgaagcttacgtagaacaaaaactcatctcagaagaggatctgaatagcgccgtcgaccatcatcatcatcatcattga

SEQ ID NO: 456 - protein, 802 aa, Artificial Sequence
  Description of Artificial Sequence:Thermococcus species 9degreesN-7 mutant DNA polymerase, 9degreesN mutant
MILDTDYITENGKPVIRVFKKENGEFKIEYDRTFEPYFYALLKDDSAIEDVKKVTAKRHGTVVKVKRAEKVQKKFLGRPIEVWKLYFNHPQDVPAIRDRIRAHPAVVDIYEYDIPFAKRYLIDKGLIPMEGDEELTMLAFAIATLYHEGEEFGTGPILMISYADGSEARVITWKKIDLPYVDVVSTEKEMIKRFLRVVREKDPDVLITYNGDNFDFAYLKKRCEELGIKFTLGRDGSEPKIQRMGDRFAVEVKGRIHFDLYPVIRRTINLPTYTLEAVYEAVFGKPKEKVYAEEIAQAWESGEGLERVARYSMEDAKVTYELGREFFPMEAQLSRLIGQSLWDVSRSSTGNLVEAFLLRKAYKRNELAPNKPDERELARRRGGYAGGYVKEPERGLWDNIVYLDFRSWYPSIIITHNVSPDTLNREGCKEYDVAPEVGHKFCKDFPGFIPSLLGDLLEERQKIERKMKATVDPLEKKLLVYRQWLIKILANSIYGYYGYAKARWYCKECAESVTAWGREYIEMVIRELEEKFGFKVLYADTDGLHATIPGADAETVKKKAKEFLKYINPKLPGLLELEYEGFYVRGFFVTKKKYAVIDEEGKITTRGLEIVRRDWSEIAKETQARVLEAILKHGDVEEAVRIVKEVTEKLSKYEVPPEKLVIHEQITRDLRDYKATGPHVAVAKRLAARGVKIRPGTVISYIVLKGSGRIGDRAIPADEFDPTKHRYDAEYYIENQVLPAVERILKAFGYRKEDLRYQKTKQVGSGAWLKVKGKKGTEAYVEQKLISEEDLNSAVDHHHHHH

SEQ ID NO: 457 - DNA, 2409 bp, Artificial Sequence
  Description of Artificial Sequence:Thermococcus species 9degreesN-7 mutant DNA polymerase, 9degreesN mutant
atgattctcgataccgactacatcaccgagaacgggaagcccgtgataagggtcttcaagaaggagaacggcgagtttaaaatcgagtacgacagaaccttcgagccctacttctacgcccttctgaaggacgattctgcgatagaggacgtcaagaaggtaaccgcaaagaggcacggaacggttgtcaaggtgaagcgcgccgagaaggtgcagaagaagttcctcggcaggccgatagaggtctggaagctctacttcaaccatcctcaggacgtcccggcgattcgagacaggatacgcgcccaccccgctgtcgttgacatctacgagtacgacatacccttcgccaagcgctacctcatcgacaagggcctgattccgatggagggcgacgaggagcttacgatgctcgccttcgcgatcgcaaccctctatcacgagggcgaggagttcggaaccgggccgattctcatgataagctacgccgacgggagcgaggcgagggtgataacctggaagaagattgaccttccgtacgttgacgtcgtctcgaccgagaaggagatgattaagcgcttcctccgcgtcgtcagggagaaggaccccgacgtgctcatcacctacaacggcgacaacttcgacttcgcctacctgaagaagcgctgtgaggaactcggaataaagttcacactcggcagggacgggagcgagccgaagatacagcgaatgggcgaccgctttgccgttgaggtgaagggcaggattcacttcgacctctaccccgtcataaggcgcacgataaacctcccgacctacacccttgaggccgtttacgaggccgtctttggaaagcccaaggagaaggtttacgcagaggagatagcgcaggcctgggagagcggggagggccttgaaagggttgcaagatactcgatggaggacgctaaggtgacctacgagctgggaagggagttcttcccgatggaggcccagctttcgaggcttataggccagagcctctgggacgtctcgcgctcgagcaccggaaatttggtggaggcattcctcctgcggaaggcctacaagaggaacgagctcgccccaaacaagcccgacgagagggagctcgcgagacggcgcgggggctacgctggcgggtacgttaaggaaccagagcggggattgtgggacaacattgtgtatttagacttccgctcgtggtatccttcaatcatcataacccacaacgtctcgccggataccctcaaccgcgagggctgtaaagagtacgacgtcgcccctgaggttggacacaagttctgcaaggacttccccggcttcataccaagcctcctgggagatttgctcgaggagaggcagaagatagagcggaagatgaaggcaacggttgacccgctggagaagaaactcctcgtgtacaggcagtggcttataaaaatcctcgccaacagccattacggctactacggctacgccaaggcccggtggtactgcaaggagtgcgccgagagcgttacggcctggggaagggagtatatagaaatggttatccgggaactcgaagaaaaattcggttttaaagttctctatgccgatacagacggtctccatgctaccattcccggagcagacgctgaaacagtcaagaaaaaagcaaaggagttcttaaaatacattaatccaaaactgcccggcctgctcgaacttgagtacgagggcttctacgtgaggggcttcttcgtcacgaagaagaagtacgctgtgatagacgaggagggcaagataaccacgaggggtcttgagattgtgaggcgcgactggagcgagatagcgaaggagacccaggccagggtcttagaggcgatactcaagcacggtgacgtcgaggaggccgttaggatagtcaaggaagtgacggaaaagctgagcaagtatgaggtcccgcccgagaagctggtaatccacgagcagataacgcgcgatttgagggattacaaagccaccggcccgcacgttgccgttgcgaagaggctcgcggcgcgtggagtgaaaatccggcccggcacggtgataagctacatcgtcctaaagggctctggaaggataggcgacagggcgattccagctgatgagttcgacccgacgaagcaccgctacgatgcggaatactacatcgagaaccaggttctcccggcggtggagaggattctaaaagccttcggctatcggaaggaggatttgcgctaccagaagacgaagcaggtcggctcgggcgcgtggctgaaggtgaaggggaagaagggtaccgaagcttacgtagaacaaaaactcatctcagaagaggatctgaatagcgccgtcgaccatcatcatcatcatcattga

SEQ ID NO: 458 - protein, 802 aa, Artificial Sequence
  Description of Artificial Sequence:Thermococcus species 9degreesN-7 mutant DNA polymerase, 9degreesN mutant
MILDTDYITENGKPVIRVFKKENGEFKIEYDRTFEPYFYALLKDDSAIEDVKKVTAKRHGTVVKVKRAEKVQKKFLGRPIEVWKLYFNHPQDVPAIRDRIRAHPAVVDIYEYDIPFAKRYLIDKGLIPMEGDEELTMLAFAIATLYHEGEEFGTGPILMISYADGSEARVITWKKIDLPYVDVVSTEKEMIKRFLRVVREKDPDVLITYNGDNFDFAYLKKRCEELGIKFTLGRDGSEPKIQRMGDRFAVEVKGRIHFDLYPVIRRTINLPTYTLEAVYEAVFGKPKEKVYAEEIAQAWESGEGLERVARYSMEDAKVTYELGREFFPMEAQLSRLIGQSLWDVSRSSTGNLVEAFLLRKAYKRNELAPNKPDERELARRRGGYAGGYVKEPERGLWDNIVYLDFRSWYPSIIITHNVSPDTLNREGCKEYDVAPEVGHKFCKDFPGFIPSLLGDLLEERQKIERKMKATVDPLEKKLLVYRQWLIKILANSHYGYYGYAKARWYCKECAESVTAWGREYIEMVIRELEEKFGFKVLYADTDGLHATIPGADAETVKKKAKEFLKYINPKLPGLLELEYEGFYVRGFFVTKKKYAVIDEEGKITTRGLEIVRRDWSEIAKETQARVLEAILKHGDVEEAVRIVKEVTEKLSKYEVPPEKLVIHEQITRDLRDYKATGPHVAVAKRLAARGVKIRPGTVISYIVLKGSGRIGDRAIPADEFDPTKHRYDAEYYIENQVLPAVERILKAFGYRKEDLRYQKTKQVGSGAWLKVKGKKGTEAYVEQKLISEEDLNSAVDHHHHHH

SEQ ID NO: 459 - DNA, 2409 bp, Artificial Sequence
  Description of Artificial Sequence:Thermococcus species 9degreesN-7 mutant DNA polymerase, 9degreesN mutant
atgattctcgataccgactacatcaccgagaacgggaagcccgtgataagggtcttcaagaaggagaacggcgagtttaaaatcgagtacgacagaaccttcgagccctacttctacgcccttctgaaggacgattctgcgatagaggacgtcaagaaggtaaccgcaaagaggcacggaacggttgtcaaggtgaagcgcgccgagaaggtgcagaagaagttcctcggcaggccgatagaggtctggaagctctacttcaaccatcctcaggacgtcccggcgattcgagacaggatacgcgcccaccccgctgtcgttgacatctacgagtacgacatacccttcgccaagcgctacctcatcgacaagggcctgattccgatggagggcgacgaggagcttacgatgctcgccttcgcgatcgcaaccctctatcacgagggcgaggagttcggaaccgggccgattctcatgataagctacgccgacgggagcgaggcgagggtgataacctggaagaagattgaccttccgtacgttgacgtcgtctcgaccgagaaggagatgattaagcgcttcctccgcgtcgtcagggagaaggaccccgacgtgctcatcacctacaacggcgacaacttcgacttcgcctacctgaagaagcgctgtgaggaactcggaataaagttcacactcggcagggacgggagcgagccgaagatacagcgaatgggcgaccgctttgccgttgaggtgaagggcaggattcacttcgacctctaccccgtcataaggcgcacgataaacctcccgacctacacccttgaggccgtttacgaggccgtctttggaaagcccaaggagaaggtttacgcagaggagatagcgcaggcctgggagagcggggagggccttgaaagggttgcaagatactcgatggaggacgctaaggtgacctacgagctgggaagggagttcttcccgatggaggcccagctttcgaggcttataggccagagcctctgggacgtctcgcgctcgagcaccggaaatttggtggaggcattcctcctgcggaaggcctacaagaggaacgagctcgccccaaacaagcccgacgagagggagctcgcgagacggcgcgggggctacgctggcgggtacgttaaggaaccagagcggggattgtgggacaacattgtgtatttagacttccgctcgtggtatccttcaatcatcataacccacaacgtctcgccggataccctcaaccgcgagggctgtaaagagtacgacgtcgcccctgaggttggacacaagttctgcaaggacttccccggcttcataccaagcctcctgggagatttgctcgaggagaggcagaagatagagcggaagatgaaggcaacggttgacccgctggagaagaaactcctcgtgtacaggcagtggcttataaaaatcctcgccaacagcacctacggctactacggctacgccaaggcccggtggtactgcaaggagtgcgccgagagcgttacggcctggggaagggagtatatagaaatggttatccgggaactcgaagaaaaattcggttttaaagttctctatgccgatacagacggtctccatgctaccattcccggagcagacgctgaaacagtcaagaaaaaagcaaaggagttcttaaaatacattaatccaaaactgcccggcctgctcgaacttgagtacgagggcttctacgtgaggggcttcttcgtcacgaagaagaagtacgctgtgatagacgaggagggcaagataaccacgaggggtcttgagattgtgaggcgcgactggagcgagatagcgaaggagacccaggccagggtcttagaggcgatactcaagcacggtgacgtcgaggaggccgttaggatagtcaaggaagtgacggaaaagctgagcaagtatgaggtcccgcccgagaagctggtaatccacgagcagataacgcgcgatttgagggattacaaagccaccggcccgcacgttgccgttgcgaagaggctcgcggcgcgtggagtgaaaatccggcccggcacggtgataagctacatcgtcctaaagggctctggaaggataggcgacagggcgattccagctgatgagttcgacccgacgaagcaccgctacgatgcggaatactacatcgagaaccaggttctcccggcggtggagaggattctaaaagccttcggctatcggaaggaggatttgcgctaccagaagacgaagcaggtcggctcgggcgcgtggctgaaggtgaaggggaagaagggtaccgaagcttacgtagaacaaaaactcatctcagaagaggatctgaatagcgccgtcgaccatcatcatcatcatcattga

SEQ ID NO: 460 - protein, 802 aa, Artificial Sequence
  Description of Artificial Sequence:Thermococcus species 9degreesN-7 mutant DNA polymerase, 9degreesN mutant
MILDTDYITENGKPVIRVFKKENGEFKIEYDRTFEPYFYALLKDDSAIEDVKKVTAKRHGTVVKVKRAEKVQKKFLGRPIEVWKLYFNHPQDVPAIRDRIRAHPAVVDIYEYDIPFAKRYLIDKGLIPMEGDEELTMLAFAIATLYHEGEEFGTGPILMISYADGSEARVITWKKIDLPYVDVVSTEKEMIKRFLRVVREKDPDVLITYNGDNFDFAYLKKRCEELGIKFTLGRDGSEPKIQRMGDRFAVEVKGRIHFDLYPVIRRTINLPTYTLEAVYEAVFGKPKEKVYAEEIAQAWESGEGLERVARYSMEDAKVTYELGREFFPMEAQLSRLIGQSLWDVSRSSTGNLVEAFLLRKAYKRNELAPNKPDERELARRRGGYAGGYVKEPERGLWDNIVYLDFRSWYPSIIITHNVSPDTLNREGCKEYDVAPEVGHKFCKDFPGFIPSLLGDLLEERQKIERKMKATVDPLEKKLLVYRQWLIKILANSTYGYYGYAKARWYCKECAESVTAWGREYIEMVIRELEEKFGFKVLYADTDGLHATIPGADAETVKKKAKEFLKYINPKLPGLLELEYEGFYVRGFFVTKKKYAVIDEEGKITTRGLEIVRRDWSEIAKETQARVLEAILKHGDVEEAVRIVKEVTEKLSKYEVPPEKLVIHEQITRDLRDYKATGPHVAVAKRLAARGVKIRPGTVISYIVLKGSGRIGDRAIPADEFDPTKHRYDAEYYIENQVLPAVERILKAFGYRKEDLRYQKTKQVGSGAWLKVKGKKGTEAYVEQKLISEEDLNSAVDHHHHHH

SEQ ID NO: 461 - DNA, 2409 bp, Artificial Sequence
  Description of Artificial Sequence:Thermococcus species 9degreesN-7 mutant DNA polymerase, 9degreesN mutant
atgattctcgataccgactacatcaccgagaacgggaagcccgtgataagggtcttcaagaaggagaacggcgagtttaaaatcgagtacgacagaaccttcgagccctacttctacgcccttctgaaggacgattctgcgatagaggacgtcaagaaggtaaccgcaaagaggcacggaacggttgtcaaggtgaagcgcgccgagaaggtgcagaagaagttcctcggcaggccgatagaggtctggaagctctacttcaaccatcctcaggacgtcccggcgattcgagacaggatacgcgcccaccccgctgtcgttgacatctacgagtacgacatacccttcgccaagcgctacctcatcgacaagggcctgattccgatggagggcgacgaggagcttacgatgctcgccttcgcgatcgcaaccctctatcacgagggcgaggagttcggaaccgggccgattctcatgataagctacgccgacgggagcgaggcgagggtgataacctggaagaagattgaccttccgtacgttgacgtcgtctcgaccgagaaggagatgattaagcgcttcctccgcgtcgtcagggagaaggaccccgacgtgctcatcacctacaacggcgacaacttcgacttcgcctacctgaagaagcgctgtgaggaactcggaataaagttcacactcggcagggacgggagcgagccgaagatacagcgaatgggcgaccgctttgccgttgaggtgaagggcaggattcacttcgacctctaccccgtcataaggcgcacgataaacctcccgacctacacccttgaggccgtttacgaggccgtctttggaaagcccaaggagaaggtttacgcagaggagatagcgcaggcctgggagagcggggagggccttgaaagggttgcaagatactcgatggaggacgctaaggtgacctacgagctgggaagggagttcttcccgatggaggcccagctttcgaggcttataggccagagcctctgggacgtctcgcgctcgagcaccggaaatttggtggaggcattcctcctgcggaaggcctacaagaggaacgagctcgccccaaacaagcccgacgagagggagctcgcgagacggcgcgggggctacgctggcgggtacgttaaggaaccagagcggggattgtgggacaacattgtgtatttagacttccgctcgtggtatccttcaatcatcataacccacaacgtctcgccggataccctcaaccgcgagggctgtaaagagtacgacgtcgcccctgaggttggacacaagttctgcaaggacttccccggcttcataccaagcctcctgggagatttgctcgaggagaggcagaagatagagcggaagatgaaggcaacggttgacccgctggagaagaaactcctcgtgtacaggcagtggcttataaaaatcctcgccaacagcgtctacggctactacggctacgccaaggcccggtggtactgcaaggagtgcgccgagagcgttacggcctggggaagggagtatatagaaatggttatccgggaactcgaagaaaaattcggttttaaagttctctatgccgatacagacggtctccatgctaccattcccggagcagacgctgaaacagtcaagaaaaaagcaaaggagttcttaaaatacattaatccaaaactgcccggcctgctcgaacttgagtacgagggcttctacgtgaggggcttcttcgtcacgaagaagaagtacgctgtgatagacgaggagggcaagataaccacgaggggtcttgagattgtgaggcgcgactggagcgagatagcgaaggagacccaggccagggtcttagaggcgatactcaagcacggtgacgtcgaggaggccgttaggatagtcaaggaagtgacggaaaagctgagcaagtatgaggtcccgcccgagaagctggtaatccacgagcagataacgcgcgatttgagggattacaaagccaccggcccgcacgttgccgttgcgaagaggctcgcggcgcgtggagtgaaaatccggcccggcacggtgataagctacatcgtcctaaagggctctggaaggataggcgacagggcgattccagctgatgagttcgacccgacgaagcaccgctacgatgcggaatactacatcgagaaccaggttctcccggcggtggagaggattctaaaagccttcggctatcggaaggaggatttgcgctaccagaagacgaagcaggtcggctcgggcgcgtggctgaaggtgaaggggaagaagggtaccgaagcttacgtagaacaaaaactcatctcagaagaggatctgaatagcgccgtcgaccatcatcatcatcatcattga

SEQ ID NO: 462 - protein, 802 aa, Artificial Sequence
  Description of Artificial Sequence:Thermococcus species 9degreesN-7 mutant DNA polymerase, 9degreesN mutant
MILDTDYITENGKPVIRVFKKENGEFKIEYDRTFEPYFYALLKDDSAIEDVKKVTAKRHGTVVKVKRAEKVQKKFLGRPIEVWKLYFNHPQDVPAIRDRIRAHPAVVDIYEYDIPFAKRYLIDKGLIPMEGDEELTMLAFAIATLYHEGEEFGTGPILMISYADGSEARVITWKKIDLPYVDVVSTEKEMIKRFLRVVREKDPDVLITYNGDNFDFAYLKKRCEELGIKFTLGRDGSEPKIQRMGDRFAVEVKGRIHFDLYPVIRRTINLPTYTLEAVYEAVFGKPKEKVYAEEIAQAWESGEGLERVARYSMEDAKVTYELGREFFPMEAQLSRLIGQSLWDVSRSSTGNLVEAFLLRKAYKRNELAPNKPDERELARRRGGYAGGYVKEPERGLWDNIVYLDFRSWYPSIIITHNVSPDTLNREGCKEYDVAPEVGHKFCKDFPGFIPSLLGDLLEERQKIERKMKATVDPLEKKLLVYRQWLIKILANSVYGYYGYAKARWYCKECAESVTAWGREYIEMVIRELEEKFGFKVLYADTDGLHATIPGADAETVKKKAKEFLKYINPKLPGLLELEYEGFYVRGFFVTKKKYAVIDEEGKITTRGLEIVRRDWSEIAKETQARVLEAILKHGDVEEAVRIVKEVTEKLSKYEVPPEKLVIHEQITRDLRDYKATGPHVAVAKRLAARGVKIRPGTVISYIVLKGSGRIGDRAIPADEFDPTKHRYDAEYYIENQVLPAVERILKAFGYRKEDLRYQKTKQVGSGAWLKVKGKKGTEAYVEQKLISEEDLNSAVDHHHHHH

SEQ ID NO: 463 - DNA, 2409 bp, Artificial Sequence
  Description of Artificial Sequence:Thermococcus species 9degreesN-7 mutant DNA polymerase, 9degreesN mutant
atgattctcgataccgactacatcaccgagaacgggaagcccgtgataagggtcttcaagaaggagaacggcgagtttaaaatcgagtacgacagaaccttcgagccctacttctacgcccttctgaaggacgattctgcgatagaggacgtcaagaaggtaaccgcaaagaggcacggaacggttgtcaaggtgaagcgcgccgagaaggtgcagaagaagttcctcggcaggccgatagaggtctggaagctctacttcaaccatcctcaggacgtcccggcgattcgagacaggatacgcgcccaccccgctgtcgttgacatctacgagtacgacatacccttcgccaagcgctacctcatcgacaagggcctgattccgatggagggcgacgaggagcttacgatgctcgccttcgcgatcgcaaccctctatcacgagggcgaggagttcggaaccgggccgattctcatgataagctacgccgacgggagcgaggcgagggtgataacctggaagaagattgaccttccgtacgttgacgtcgtctcgaccgagaaggagatgattaagcgcttcctccgcgtcgtcagggagaaggaccccgacgtgctcatcacctacaacggcgacaacttcgacttcgcctacctgaagaagcgctgtgaggaactcggaataaagttcacactcggcagggacgggagcgagccgaagatacagcgaatgggcgaccgctttgccgttgaggtgaagggcaggattcacttcgacctctaccccgtcataaggcgcacgataaacctcccgacctacacccttgaggccgtttacgaggccgtctttggaaagcccaaggagaaggtttacgcagaggagatagcgcaggcctgggagagcggggagggccttgaaagggttgcaagatactcgatggaggacgctaaggtgacctacgagctgggaagggagttcttcccgatggaggcctgtctttcgaggcttataggccagagcctctgggacgtctcgcgctcgagcaccggaaatttggtggaggcattcctcctgcggaaggcctacaagaggaacgagctcgccccaaacaagcccgacgagagggagctcgcgagacggcgcgggggctacgctggcgggtacgttaaggaaccagagcggggattgtgggacaacattgtgtatttagacttccgctcgtggtatccttcaatcatcataacccacaacgtctcgccggataccctcaaccgcgagggctgtaaagagtacgacgtcgcccctgaggttggacacaagttctgcaaggacttccccggcttcataccaagcctcctgggagatttgctcgaggagaggcagaagatagagcggaagatgaaggcaacggttgacccgctggagaagaaactcctcgtgtacaggcagtggcttataaaaatcctcgccaacagcttctacggctactacggctacgccaaggcccggtggtactgcaaggagtgcgccgagagcgttacggcctggggaagggagtatatagaaatggttatccgggaactcgaagaaaaattcggttttaaagttctctatgccgatacagacggtctccatgctaccattcccggagcagacgctgaaacagtcaagaaaaaagcaaaggagttcttaaaatacattaatccaaaactgcccggcctgctcgaacttgagtacgagggcttctacgtgaggggcttcttcgtcacgaagaagaagtacgctgtgatagacgaggagggcaagataaccacgaggggtcttgagattgtgaggcgcgactggagcgagatagcgaaggagacccaggccagggtcttagaggcgatactcaagcacggtgacgtcgaggaggccgttaggatagtcaaggaagtgacggaaaagctgagcaagtatgaggtcccgcccgagaagctggtaatccacgagcagataacgcgcgatttgagggattacaaagccaccggcccgcacgttgccgttgcgaagaggctcgcggcgcgtggagtgaaaatccggcccggcacggtgataagctacatcgtcctaaagggctctggaaggataggcgacagggcgattccagctgatgagttcgacccgacgaagcaccgctacgatgcggaatactacatcgagaaccaggttctcccggcggtggagaggattctaaaagccttcggctatcggaaggaggatttgcgctaccagaagacgaagcaggtcggctcgggcgcgtggctgaaggtgaaggggaagaagggtaccgaagcttacgtagaacaaaaactcatctcagaagaggatctgaatagcgccgtcgaccatcatcatcatcatcattga

SEQ ID NO: 464 - protein, 802 aa, Artificial Sequence
  Description of Artificial Sequence:Thermococcus species 9degreesN-7 mutant DNA polymerase, 9degreesN mutant
MILDTDYITENGKPVIRVFKKENGEFKIEYDRTFEPYFYALLKDDSAIEDVKKVTAKRHGTVVKVKRAEKVQKKFLGRPIEVWKLYFNHPQDVPAIRDRIRAHPAVVDIYEYDIPFAKRYLIDKGLIPMEGDEELTMLAFAIATLYHEGEEFGTGPILMISYADGSEARVITWKKIDLPYVDVVSTEKEMIKRFLRVVREKDPDVLITYNGDNFDFAYLKKRCEELGIKFTLGRDGSEPKIQRMGDRFAVEVKGRIHFDLYPVIRRTINLPTYTLEAVYEAVFGKPKEKVYAEEIAQAWESGEGLERVARYSMEDAKVTYELGREFFPMEACLSRLIGQSLWDVSRSSTGNLVEAFLLRKAYKRNELAPNKPDERELARRRGGYAGGYVKEPERGLWDNIVYLDFRSWYPSIIITHNVSPDTLNREGCKEYDVAPEVGHKFCKDFPGFIPSLLGDLLEERQKIERKMKATVDPLEKKLLVYRQWLIKILANSFYGYYGYAKARWYCKECAESVTAWGREYIEMVIRELEEKFGFKVLYADTDGLHATIPGADAETVKKKAKEFLKYINPKLPGLLELEYEGFYVRGFFVTKKKYAVIDEEGKITTRGLEIVRRDWSEIAKETQARVLEAILKHGDVEEAVRIVKEVTEKLSKYEVPPEKLVIHEQITRDLRDYKATGPHVAVAKRLAARGVKIRPGTVISYIVLKGSGRIGDRAIPADEFDPTKHRYDAEYYIENQVLPAVERILKAFGYRKEDLRYQKTKQVGSGAWLKVKGKKGTEAYVEQKLISEEDLNSAVDHHHHHH

SEQ ID NO: 465 - DNA, 2409 bp, Artificial Sequence
  Description of Artificial Sequence:Thermococcus species 9degreesN-7 mutant DNA polymerase, 9degreesN mutant
atgattctcgataccgactacatcaccgagaacgggaagcccgtgataagggtcttcaagaaggagaacggcgagtttaaaatcgagtacgacagaaccttcgagccctacttctacgcccttctgaaggacgattctgcgatagaggacgtcaagaaggtaaccgcaaagaggcacggaacggttgtcaaggtgaagcgcgccgagaaggtgcagaagaagttcctcggcaggccgatagaggtctggaagctctacttcaaccatcctcaggacgtcccggcgattcgagacaggatacgcgcccaccccgctgtcgttgacatctacgagtacgacatacccttcgccaagcgctacctcatcgacaagggcctgattccgatggagggcgacgaggagcttacgatgctcgccttcgcgatcgcaaccctctatcacgagggcgaggagttcggaaccgggccgattctcatgataagctacgccgacgggagcgaggcgagggtgataacctggaagaagattgaccttccgtacgttgacgtcgtctcgaccgagaaggagatgattaagcgcttcctccgcgtcgtcagggagaaggaccccgacgtgctcatcacctacaacggcgacaacttcgacttcgcctacctgaagaagcgctgtgaggaactcggaataaagttcacactcggcagggacgggagcgagccgaagatacagcgaatgggcgaccgctttgccgttgaggtgaagggcaggattcacttcgacctctaccccgtcataaggcgcacgataaacctcccgacctacacccttgaggccgtttacgaggccgtctttggaaagcccaaggagaaggtttacgcagaggagatagcgcaggcctgggagagcggggagggccttgaaagggttgcaagatactcgatggaggacgctaaggtgacctacgagctgggaagggagttcttcccgatggaggcctcgctttcgaggcttataggccagagcctctgggacgtctcgcgctcgagcaccggaaatttggtggaggcattcctcctgcggaaggcctacaagaggaacgagctcgccccaaacaagcccgacgagagggagctcgcgagacggcgcgggggctacgctggcgggtacgttaaggaaccagagcggggattgtgggacaacattgtgtatttagacttccgctcgtggtatccttcaatcatcataacccacaacgtctcgccggataccctcaaccgcgagggctgtaaagagtacgacgtcgcccctgaggttggacacaagttctgcaaggacttccccggcttcataccaagcctcctgggagatttgctcgaggagaggcagaagatagagcggaagatgaaggcaacggttgacccgctggagaagaaactcctcgtgtacaggcagtggcttataaaaatcctcgccaacagcttctacggctactacggctacgccaaggcccggtggtactgcaaggagtgcgccgagagcgttacggcctggggaagggagtatatagaaatggttatccgggaactcgaagaaaaattcggttttaaagttctctatgccgatacagacggtctccatgctaccattcccggagcagacgctgaaacagtcaagaaaaaagcaaaggagttcttaaaatacattaatccaaaactgcccggcctgctcgaacttgagtacgagggcttctacgtgaggggcttcttcgtcacgaagaagaagtacgctgtgatagacgaggagggcaagataaccacgaggggtcttgagattgtgaggcgcgactggagcgagatagcgaaggagacccaggccagggtcttagaggcgatactcaagcacggtgacgtcgaggaggccgttaggatagtcaaggaagtgacggaaaagctgagcaagtatgaggtcccgcccgagaagctggtaatccacgagcagataacgcgcgatttgagggattacaaagccaccggcccgcacgttgccgttgcgaagaggctcgcggcgcgtggagtgaaaatccggcccggcacggtgataagctacatcgtcctaaagggctctggaaggataggcgacagggcgattccagctgatgagttcgacccgacgaagcaccgctacgatgcggaatactacatcgagaaccaggttctcccggcggtggagaggattctaaaagccttcggctatcggaaggaggatttgcgctaccagaagacgaagcaggtcggctcgggcgcgtggctgaaggtgaaggggaagaagggtaccgaagcttacgtagaacaaaaactcatctcagaagaggatctgaatagcgccgtcgaccatcatcatcatcatcattga

SEQ ID NO: 466 - protein, 802 aa, Artificial Sequence
  Description of Artificial Sequence:Thermococcus species 9degreesN-7 mutant DNA polymerase, 9degreesN mutant
MILDTDYITENGKPVIRVFKKENGEFKIEYDRTFEPYFYALLKDDSAIEDVKKVTAKRHGTVVKVKRAEKVQKKFLGRPIEVWKLYFNHPQDVPAIRDRIRAHPAVVDIYEYDIPFAKRYLIDKGLIPMEGDEELTMLAFAIATLYHEGEEFGTGPILMISYADGSEARVITWKKIDLPYVDVVSTEKEMIKRFLRVVREKDPDVLITYNGDNFDFAYLKKRCEELGIKFTLGRDGSEPKIQRMGDRFAVEVKGRIHFDLYPVIRRTINLPTYTLEAVYEAVFGKPKEKVYAEEIAQAWESGEGLERVARYSMEDAKVTYELGREFFPMEASLSRLIGQSLWDVSRSSTGNLVEAFLLRKAYKRNELAPNKPDERELARRRGGYAGGYVKEPERGLWDNIVYLDFRSWYPSIIITHNVSPDTLNREGCKEYDVAPEVGHKFCKDFPGFIPSLLGDLLEERQKIERKMKATVDPLEKKLLVYRQWLIKILANSFYGYYGYAKARWYCKECAESVTAWGREYIEMVIRELEEKFGFKVLYADTDGLHATIPGADAETVKKKAKEFLKYINPKLPGLLELEYEGFYVRGFFVTKKKYAVIDEEGKITTRGLEIVRRDWSEIAKETQARVLEAILKHGDVEEAVRIVKEVTEKLSKYEVPPEKLVIHEQITRDLRDYKATGPHVAVAKRLAARGVKIRPGTVISYIVLKGSGRIGDRAIPADEFDPTKHRYDAEYYIENQVLPAVERILKAFGYRKEDLRYQKTKQVGSGAWLKVKGKKGTEAYVEQKLISEEDLNSAVDHHHHHH

SEQ ID NO: 467 - DNA, 2409 bp, Artificial Sequence
  Description of Artificial Sequence:Thermococcus species 9degreesN-7 mutant DNA polymerase, 9degreesN mutant
atgattctcgataccgactacatcaccgagaacgggaagcccgtgataagggtcttcaagaaggagaacggcgagtttaaaatcgagtacgacagaaccttcgagccctacttctacgcccttctgaaggacgattctgcgatagaggacgtcaagaaggtaaccgcaaagaggcacggaacggttgtcaaggtgaagcgcgccgagaaggtgcagaagaagttcctcggcaggccgatagaggtctggaagctctacttcaaccatcctcaggacgtcccggcgattcgagacaggatacgcgcccaccccgctgtcgttgacatctacgagtacgacatacccttcgccaagcgctacctcatcgacaagggcctgattccgatggagggcgacgaggagcttacgatgctcgccttcgcgatcgcaaccctctatcacgagggcgaggagttcggaaccgggccgattctcatgataagctacgccgacgggagcgaggcgagggtgataacctggaagaagattgaccttccgtacgttgacgtcgtctcgaccgagaaggagatgattaagcgcttcctccgcgtcgtcagggagaaggaccccgacgtgctcatcacctacaacggcgacaacttcgacttcgcctacctgaagaagcgctgtgaggaactcggaataaagttcacactcggcagggacgggagcgagccgaagatacagcgaatgggcgaccgctttgccgttgaggtgaagggcaggattcacttcgacctctaccccgtcataaggcgcacgataaacctcccgacctacacccttgaggccgtttacgaggccgtctttggaaagcccaaggagaaggtttacgcagaggagatagcgcaggcctgggagagcggggagggccttgaaagggttgcaagatactcgatggaggacgctaaggtgacctacgagctgggaagggagttcttcccgatggaggccgacctttcgaggcttataggccagagcctctgggacgtctcgcgctcgagcaccggaaatttggtggaggcattcctcctgcggaaggcctacaagaggaacgagctcgccccaaacaagcccgacgagagggagctcgcgagacggcgcgggggctacgctggcgggtacgttaaggaaccagagcggggattgtgggacaacattgtgtatttagacttccgctcgtggtatccttcaatcatcataacccacaacgtctcgccggataccctcaaccgcgagggctgtaaagagtacgacgtcgcccctgaggttggacacaagttctgcaaggacttccccggcttcataccaagcctcctgggagatttgctcgaggagaggcagaagatagagcggaagatgaaggcaacggttgacccgctggagaagaaactcctcgtgtacaggcagtggcttataaaaatcctcgccaacagcttctacggctactacggctacgccaaggcccggtggtactgcaaggagtgcgccgagagcgttacggcctggggaagggagtatatagaaatggttatccgggaactcgaagaaaaattcggttttaaagttctctatgccgatacagacggtctccatgctaccattcccggagcagacgctgaaacagtcaagaaaaaagcaaaggagttcttaaaatacattaatccaaaactgcccggcctgctcgaacttgagtacgagggcttctacgtgaggggcttcttcgtcacgaagaagaagtacgctgtgatagacgaggagggcaagataaccacgaggggtcttgagattgtgaggcgcgactggagcgagatagcgaaggagacccaggccagggtcttagaggcgatactcaagcacggtgacgtcgaggaggccgttaggatagtcaaggaagtgacggaaaagctgagcaagtatgaggtcccgcccgagaagctggtaatccacgagcagataacgcgcgatttgagggattacaaagccaccggcccgcacgttgccgttgcgaagaggctcgcggcgcgtggagtgaaaatccggcccggcacggtgataagctacatcgtcctaaagggctctggaaggataggcgacagggcgattccagctgatgagttcgacccgacgaagcaccgctacgatgcggaatactacatcgagaaccaggttctcccggcggtggagaggattctaaaagccttcggctatcggaaggaggatttgcgctaccagaagacgaagcaggtcggctcgggcgcgtggctgaaggtgaaggggaagaagggtaccgaagcttacgtagaacaaaaactcatctcagaagaggatctgaatagcgccgtcgaccatcatcatcatcatcattga

SEQ ID NO: 468 - protein, 802 aa, Artificial Sequence
  Description of Artificial Sequence:Thermococcus species 9degreesN-7 mutant DNA polymerase, 9degreesN mutant
MILDTDYITENGKPVIRVFKKENGEFKIEYDRTFEPYFYALLKDDSAIEDVKKVTAKRHGTVVKVKRAEKVQKKFLGRPIEVWKLYFNHPQDVPAIRDRIRAHPAVVDIYEYDIPFAKRYLIDKGLIPMEGDEELTMLAFAIATLYHEGEEFGTGPILMISYADGSEARVITWKKIDLPYVDVVSTEKEMIKRFLRVVREKDPDVLITYNGDNFDFAYLKKRCEELGIKFTLGRDGSEPKIQRMGDRFAVEVKGRIHFDLYPVIRRTINLPTYTLEAVYEAVFGKPKEKVYAEEIAQAWESGEGLERVARYSMEDAKVTYELGREFFPMEADLSRLIGQSLWDVSRSSTGNLVEAFLLRKAYKRNELAPNKPDERELARRRGGYAGGYVKEPERGLWDNIVYLDFRSWYPSIIITHNVSPDTLNREGCKEYDVAPEVGHKFCKDFPGFIPSLLGDLLEERQKIERKMKATVDPLEKKLLVYRQWLIKILANSFYGYYGYAKARWYCKECAESVTAWGREYIEMVIRELEEKFGFKVLYADTDGLHATIPGADAETVKKKAKEFLKYINPKLPGLLELEYEGFYVRGFFVTKKKYAVIDEEGKITTRGLEIVRRDWSEIAKETQARVLEAILKHGDVEEAVRIVKEVTEKLSKYEVPPEKLVIHEQITRDLRDYKATGPHVAVAKRLAARGVKIRPGTVISYIVLKGSGRIGDRAIPADEFDPTKHRYDAEYYIENQVLPAVERILKAFGYRKEDLRYQKTKQVGSGAWLKVKGKKGTEAYVEQKLISEEDLNSAVDHHHHHH

SEQ ID NO: 469 - DNA, 2409 bp, Artificial Sequence
  Description of Artificial Sequence:Thermococcus species 9degreesN-7 mutant DNA polymerase, 9degreesN mutant
atgattctcgataccgactacatcaccgagaacgggaagcccgtgataagggtcttcaagaaggagaacggcgagtttaaaatcgagtacgacagaaccttcgagccctacttctacgcccttctgaaggacgattctgcgatagaggacgtcaagaaggtaaccgcaaagaggcacggaacggttgtcaaggtgaagcgcgccgagaaggtgcagaagaagttcctcggcaggccgatagaggtctggaagctctacttcaaccatcctcaggacgtcccggcgattcgagacaggatacgcgcccaccccgctgtcgttgacatctacgagtacgacatacccttcgccaagcgctacctcatcgacaagggcctgattccgatggagggcgacgaggagcttacgatgctcgccttcgcgatcgcaaccctctatcacgagggcgaggagttcggaaccgggccgattctcatgataagctacgccgacgggagcgaggcgagggtgataacctggaagaagattgaccttccgtacgttgacgtcgtctcgaccgagaaggagatgattaagcgcttcctccgcgtcgtcagggagaaggaccccgacgtgctcatcacctacaacggcgacaacttcgacttcgcctacctgaagaagcgctgtgaggaactcggaataaagttcacactcggcagggacgggagcgagccgaagatacagcgaatgggcgaccgctttgccgttgaggtgaagggcaggattcacttcgacctctaccccgtcataaggcgcacgataaacctcccgacctacacccttgaggccgtttacgaggccgtctttggaaagcccaaggagaaggtttacgcagaggagatagcgcaggcctgggagagcggggagggccttgaaagggttgcaagatactcgatggaggacgctaaggtgacctacgagctgggaagggagttcttcccgatggaggcccctctttcgaggcttataggccagagcctctgggacgtctcgcgctcgagcaccggaaatttggtggaggcattcctcctgcggaaggcctacaagaggaacgagctcgccccaaacaagcccgacgagagggagctcgcgagacggcgcgggggctacgctggcgggtacgttaaggaaccagagcggggattgtgggacaacattgtgtatttagacttccgctcgtggtatccttcaatcatcataacccacaacgtctcgccggataccctcaaccgcgagggctgtaaagagtacgacgtcgcccctgaggttggacacaagttctgcaaggacttccccggcttcataccaagcctcctgggagatttgctcgaggagaggcagaagatagagcggaagatgaaggcaacggttgacccgctggagaagaaactcctcgtgtacaggcagtggcttataaaaatcctcgccaacagcttctacggctactacggctacgccaaggcccggtggtactgcaaggagtgcgccgagagcgttacggcctggggaagggagtatatagaaatggttatccgggaactcgaagaaaaattcggttttaaagttctctatgccgatacagacggtctccatgctaccattcccggagcagacgctgaaacagtcaagaaaaaagcaaaggagttcttaaaatacattaatccaaaactgcccggcctgctcgaacttgagtacgagggcttctacgtgaggggcttcttcgtcacgaagaagaagtacgctgtgatagacgaggagggcaagataaccacgaggggtcttgagattgtgaggcgcgactggagcgagatagcgaaggagacccaggccagggtcttagaggcgatactcaagcacggtgacgtcgaggaggccgttaggatagtcaaggaagtgacggaaaagctgagcaagtatgaggtcccgcccgagaagctggtaatccacgagcagataacgcgcgatttgagggattacaaagccaccggcccgcacgttgccgttgcgaagaggctcgcggcgcgtggagtgaaaatccggcccggcacggtgataagctacatcgtcctaaagggctctggaaggataggcgacagggcgattccagctgatgagttcgacccgacgaagcaccgctacgatgcggaatactacatcgagaaccaggttctcccggcggtggagaggattctaaaagccttcggctatcggaaggaggatttgcgctaccagaagacgaagcaggtcggctcgggcgcgtggctgaaggtgaaggggaagaagggtaccgaagcttacgtagaacaaaaactcatctcagaagaggatctgaatagcgccgtcgaccatcatcatcatcatcattga

SEQ ID NO: 470 - protein, 802 aa, Artificial Sequence
  Description of Artificial Sequence:Thermococcus species 9degreesN-7 mutant DNA polymerase, 9degreesN mutant
MILDTDYITENGKPVIRVFKKENGEFKIEYDRTFEPYFYALLKDDSAIEDVKKVTAKRHGTVVKVKRAEKVQKKFLGRPIEVWKLYFNHPQDVPAIRDRIRAHPAVVDIYEYDIPFAKRYLIDKGLIPMEGDEELTMLAFAIATLYHEGEEFGTGPILMISYADGSEARVITWKKIDLPYVDVVSTEKEMIKRFLRVVREKDPDVLITYNGDNFDFAYLKKRCEELGIKFTLGRDGSEPKIQRMGDRFAVEVKGRIHFDLYPVIRRTINLPTYTLEAVYEAVFGKPKEKVYAEEIAQAWESGEGLERVARYSMEDAKVTYELGREFFPMEAPLSRLIGQSLWDVSRSSTGNLVEAFLLRKAYKRNELAPNKPDERELARRRGGYAGGYVKEPERGLWDNIVYLDFRSWYPSIIITHNVSPDTLNREGCKEYDVAPEVGHKFCKDFPGFIPSLLGDLLEERQKIERKMKATVDPLEKKLLVYRQWLIKILANSFYGYYGYAKARWYCKECAESVTAWGREYIEMVIRELEEKFGFKVLYADTDGLHATIPGADAETVKKKAKEFLKYINPKLPGLLELEYEGFYVRGFFVTKKKYAVIDEEGKITTRGLEIVRRDWSEIAKETQARVLEAILKHGDVEEAVRIVKEVTEKLSKYEVPPEKLVIHEQITRDLRDYKATGPHVAVAKRLAARGVKIRPGTVISYIVLKGSGRIGDRAIPADEFDPTKHRYDAEYYIENQVLPAVERILKAFGYRKEDLRYQKTKQVGSGAWLKVKGKKGTEAYVEQKLISEEDLNSAVDHHHHHH

SEQ ID NO: 471 - DNA, 2409 bp, Artificial Sequence
  Description of Artificial Sequence:Thermococcus species 9degreesN-7 mutant DNA polymerase, 9degreesN mutant
atgattctcgataccgactacatcaccgagaacgggaagcccgtgataagggtcttcaagaaggagaacggcgagtttaaaatcgagtacgacagaaccttcgagccctacttctacgcccttctgaaggacgattctgcgatagaggacgtcaagaaggtaaccgcaaagaggcacggaacggttgtcaaggtgaagcgcgccgagaaggtgcagaagaagttcctcggcaggccgatagaggtctggaagctctacttcaaccatcctcaggacgtcccggcgattcgagacaggatacgcgcccaccccgctgtcgttgacatctacgagtacgacatacccttcgccaagcgctacctcatcgacaagggcctgattccgatggagggcgacgaggagcttacgatgctcgccttcgcgatcgcaaccctctatcacgagggcgaggagttcggaaccgggccgattctcatgataagctacgccgacgggagcgaggcgagggtgataacctggaagaagattgaccttccgtacgttgacgtcgtctcgaccgagaaggagatgattaagcgcttcctccgcgtcgtcagggagaaggaccccgacgtgctcatcacctacaacggcgacaacttcgacttcgcctacctgaagaagcgctgtgaggaactcggaataaagttcacactcggcagggacgggagcgagccgaagatacagcgaatgggcgaccgctttgccgttgaggtgaagggcaggattcacttcgacctctaccccgtcataaggcgcacgataaacctcccgacctacacccttgaggccgtttacgaggccgtctttggaaagcccaaggagaaggtttacgcagaggagatagcgcaggcctgggagagcggggagggccttgaaagggttgcaagatactcgatggaggacgctaaggtgacctacgagctgggaagggagttcttcccgatggaggccctactttctaggcttataggccagagcctctgggacgtctcgcgctcgagcaccggaaatttggtggaggcattcctcctgcggaaggcctacaagaggaacgagctcgccccaaacaagcccgacgagagggagctcgcgagacggcgcgggggctacgctggcgggtacgttaaggaaccagagcggggattgtgggacaacattgtgtatttagacttccgctcgtggtatccttcaatcatcataacccacaacgtctcgccggataccctcaaccgcgagggctgtaaagagtacgacgtcgcccctgaggttggacacaagttctgcaaggacttccccggcttcataccaagcctcctgggagatttgctcgaggagaggcagaagatagagcggaagatgaaggcaacggttgacccgctggagaagaaactcctcgtgtacaggcagtggcttataaaaatcctcgccaacagcttctacggctactacggctacgccaaggcccggtggtactgcaaggagtgcgccgagagcgttacggcctggggaagggagtatatagaaatggttatccgggaactcgaagaaaaattcggttttaaagttctctatgccgatacagacggtctccatgctaccattcccggagcagacgctgaaacagtcaagaaaaaagcaaaggagttcttaaaatacattaatccaaaactgcccggcctgctcgaacttgagtacgagggcttctacgtgaggggcttcttcgtcacgaagaagaagtacgctgtgatagacgaggagggcaagataaccacgaggggtcttgagattgtgaggcgcgactggagcgagatagcgaaggagacccaggccagggtcttagaggcgatactcaagcacggtgacgtcgaggaggccgttaggatagtcaaggaagtgacggaaaagctgagcaagtatgaggtcccgcccgagaagctggtaatccacgagcagataacgcgcgatttgagggattacaaagccaccggcccgcacgttgccgttgcgaagaggctcgcggcgcgtggagtgaaaatccggcccggcacggtgataagctacatcgtcctaaagggctctggaaggataggcgacagggcgattccagctgatgagttcgacccgacgaagcaccgctacgatgcggaatactacatcgagaaccaggttctcccggcggtggagaggattctaaaagccttcggctatcggaaggaggatttgcgctaccagaagacgaagcaggtcggctcgggcgcgtggctgaaggtgaaggggaagaagggtaccgaagcttacgtagaacaaaaactcatctcagaagaggatctgaatagcgccgtcgaccatcatcatcatcatcattga

SEQ ID NO: 472 - protein, 802 aa, Artificial Sequence
  Description of Artificial Sequence:Thermococcus species 9degreesN-7 mutant DNA polymerase, 9degreesN mutant
MILDTDYITENGKPVIRVFKKENGEFKIEYDRTFEPYFYALLKDDSAIEDVKKVTAKRHGTVVKVKRAEKVQKKFLGRPIEVWKLYFNHPQDVPAIRDRIRAHPAVVDIYEYDIPFAKRYLIDKGLIPMEGDEELTMLAFAIATLYHEGEEFGTGPILMISYADGSEARVITWKKIDLPYVDVVSTEKEMIKRFLRVVREKDPDVLITYNGDNFDFAYLKKRCEELGIKFTLGRDGSEPKIQRMGDRFAVEVKGRIHFDLYPVIRRTINLPTYTLEAVYEAVFGKPKEKVYAEEIAQAWESGEGLERVARYSMEDAKVTYELGREFFPMEALLSRLIGQSLWDVSRSSTGNLVEAFLLRKAYKRNELAPNKPDERELARRRGGYAGGYVKEPERGLWDNIVYLDFRSWYPSIIITHNVSPDTLNREGCKEYDVAPEVGHKFCKDFPGFIPSLLGDLLEERQKIERKMKATVDPLEKKLLVYRQWLIKILANSFYGYYGYAKARWYCKECAESVTAWGREYIEMVIRELEEKFGFKVLYADTDGLHATIPGADAETVKKKAKEFLKYINPKLPGLLELEYEGFYVRGFFVTKKKYAVIDEEGKITTRGLEIVRRDWSEIAKETQARVLEAILKHGDVEEAVRIVKEVTEKLSKYEVPPEKLVIHEQITRDLRDYKATGPHVAVAKRLAARGVKIRPGTVISYIVLKGSGRIGDRAIPADEFDPTKHRYDAEYYIENQVLPAVERILKAFGYRKEDLRYQKTKQVGSGAWLKVKGKKGTEAYVEQKLISEEDLNSAVDHHHHHH

SEQ ID NO: 473 - DNA, 2409 bp, Artificial Sequence
  Description of Artificial Sequence:Thermococcus species 9degreesN-7 mutant DNA polymerase, 9degreesN mutant
atgattctcgataccgactacatcaccgagaacgggaagcccgtgataagggtcttcaagaaggagaacggcgagtttaaaatcgagtacgacagaaccttcgagccctacttctacgcccttctgaaggacgattctgcgatagaggacgtcaagaaggtaaccgcaaagaggcacggaacggttgtcaaggtgaagcgcgccgagaaggtgcagaagaagttcctcggcaggccgatagaggtctggaagctctacttcaaccatcctcaggacgtcccggcgattcgagacaggatacgcgcccaccccgctgtcgttgacatctacgagtacgacatacccttcgccaagcgctacctcatcgacaagggcctgattccgatggagggcgacgaggagcttacgatgctcgccttcgcgatcgcaaccctctatcacgagggcgaggagttcggaaccgggccgattctcatgataagctacgccgacgggagcgaggcgagggtgataacctggaagaagattgaccttccgtacgttgacgtcgtctcgaccgagaaggagatgattaagcgcttcctccgcgtcgtcagggagaaggaccccgacgtgctcatcacctacaacggcgacaacttcgacttcgcctacctgaagaagcgctgtgaggaactcggaataaagttcacactcggcagggacgggagcgagccgaagatacagcgaatgggcgaccgctttgccgttgaggtgaagggcaggattcacttcgacctctaccccgtcataaggcgcacgataaacctcccgacctacacccttgaggccgtttacgaggccgtctttggaaagcccaaggagaaggtttacgcagaggagatagcgcaggcctgggagagcggggagggccttgaaagggttgcaagatactcgatggaggacgctaaggtgacctacgagctgggaagggagttcttcccgatggaggcccagctttcgaggcttataggccagagcctctgggacgtctcgcgctcgagcaccggaaatttggtggaggcattcctcctgcggaaggcctacaagaggaacgagctcgccccaaacaagcccgacgagagggagctcgcgagacggcgcgggggctacgctggcgggtacgttaaggaaccagagcggggattgtgggacaacattgtgtatttagacttccgctcgtggtatccttcaatcatcataacccacaacgtctcgccggataccctcaaccgcgagggctgtaaagagtacgacgtcgcccctgaggttggacacaagttctgcaaggacttccccggcttcataccaagcctcctgggagatttgctcgaggagagggctaagatagagcggaagatgaaggcaacggttgacccgctggagaagaaactcctcgtgtacaggcagtggcttataaaaatcctcgccaacagcttctacggctactacggctacgccaaggcccggtggtactgcaaggagtgcgccgagagcgttacggcctggggaagggagtatatagaaatggttatccgggaactcgaagaaaaattcggttttaaagttctctatgccgatacagacggtctccatgctaccattcccggagcagacgctgaaacagtcaagaaaaaagcaaaggagttcttaaaatacattaatccaaaactgcccggcctgctcgaacttgagtacgagggcttctacgtgaggggcttcttcgtcacgaagaagaagtacgctgtgatagacgaggagggcaagataaccacgaggggtcttgagattgtgaggcgcgactggagcgagatagcgaaggagacccaggccagggtcttagaggcgatactcaagcacggtgacgtcgaggaggccgttaggatagtcaaggaagtgacggaaaagctgagcaagtatgaggtcccgcccgagaagctggtaatccacgagcagataacgcgcgatttgagggattacaaagccaccggcccgcacgttgccgttgcgaagaggctcgcggcgcgtggagtgaaaatccggcccggcacggtgataagctacatcgtcctaaagggctctggaaggataggcgacagggcgattccagctgatgagttcgacccgacgaagcaccgctacgatgcggaatactacatcgagaaccaggttctcccggcggtggagaggattctaaaagccttcggctatcggaaggaggatttgcgctaccagaagacgaagcaggtcggctcgggcgcgtggctgaaggtgaaggggaagaagggtaccgaagcttacgtagaacaaaaactcatctcagaagaggatctgaatagcgccgtcgaccatcatcatcatcatcattga

SEQ ID NO: 474 - protein, 802 aa, Artificial Sequence
  Description of Artificial Sequence:Thermococcus species 9degreesN-7 mutant DNA polymerase, 9degreesN mutant
MILDTDYITENGKPVIRVFKKENGEFKIEYDRTFEPYFYALLKDDSAIEDVKKVTAKRHGTVVKVKRAEKVQKKFLGRPIEVWKLYFNHPQDVPAIRDRIRAHPAVVDIYEYDIPFAKRYLIDKGLIPMEGDEELTMLAFAIATLYHEGEEFGTGPILMISYADGSEARVITWKKIDLPYVDVVSTEKEMIKRFLRVVREKDPDVLITYNGDNFDFAYLKKRCEELGIKFTLGRDGSEPKIQRMGDRFAVEVKGRIHFDLYPVIRRTINLPTYTLEAVYEAVFGKPKEKVYAEEIAQAWESGEGLERVARYSMEDAKVTYELGREFFPMEAQLSRLIGQSLWDVSRSSTGNLVEAFLLRKAYKRNELAPNKPDERELARRRGGYAGGYVKEPERGLWDNIVYLDFRSWYPSIIITHNVSPDTLNREGCKEYDVAPEVGHKFCKDFPGFIPSLLGDLLEERAKIERKMKATVDPLEKKLLVYRQWLIKILANSFYGYYGYAKARWYCKECAESVTAWGREYIEMVIRELEEKFGFKVLYADTDGLHATIPGADAETVKKKAKEFLKYINPKLPGLLELEYEGFYVRGFFVTKKKYAVIDEEGKITTRGLEIVRRDWSEIAKETQARVLEAILKHGDVEEAVRIVKEVTEKLSKYEVPPEKLVIHEQITRDLRDYKATGPHVAVAKRLAARGVKIRPGTVISYIVLKGSGRIGDRAIPADEFDPTKHRYDAEYYIENQVLPAVERILKAFGYRKEDLRYQKTKQVGSGAWLKVKGKKGTEAYVEQKLISEEDLNSAVDHHHHHH

SEQ ID NO: 475 - DNA, 2409 bp, Artificial Sequence
  Description of Artificial Sequence:Thermococcus species 9degreesN-7 mutant DNA polymerase, 9degreesN mutant
atgattctcgataccgactacatcaccgagaacgggaagcccgtgataagggtcttcaagaaggagaacggcgagtttaaaatcgagtacgacagaaccttcgagccctacttctacgcccttctgaaggacgattctgcgatagaggacgtcaagaaggtaaccgcaaagaggcacggaacggttgtcaaggtgaagcgcgccgagaaggtgcagaagaagttcctcggcaggccgatagaggtctggaagctctacttcaaccatcctcaggacgtcccggcgattcgagacaggatacgcgcccaccccgctgtcgttgacatctacgagtacgacatacccttcgccaagcgctacctcatcgacaagggcctgattccgatggagggcgacgaggagcttacgatgctcgccttcgcgatcgcaaccctctatcacgagggcgaggagttcggaaccgggccgattctcatgataagctacgccgacgggagcgaggcgagggtgataacctggaagaagattgaccttccgtacgttgacgtcgtctcgaccgagaaggagatgattaagcgcttcctccgcgtcgtcagggagaaggaccccgacgtgctcatcacctacaacggcgacaacttcgacttcgcctacctgaagaagcgctgtgaggaactcggaataaagttcacactcggcagggacgggagcgagccgaagatacagcgaatgggcgaccgctttgccgttgaggtgaagggcaggattcacttcgacctctaccccgtcataaggcgcacgataaacctcccgacctacacccttgaggccgtttacgaggccgtctttggaaagcccaaggagaaggtttacgcagaggagatagcgcaggcctgggagagcggggagggccttgaaagggttgcaagatactcgatggaggacgctaaggtgacctacgagctgggaagggagttcttcccgatggaggcccagctttcgaggcttataggccagagcctctgggacgtctcgcgctcgagcaccggaaatttggtggaggcattcctcctgcggaaggcctacaagaggaacgagctcgccccaaacaagcccgacgagagggagctcgcgagacggcgcgggggctacgctggcgggtacgttaaggaaccagagcggggattgtgggacaacattgtgtatttagacttccgctcgtggtatccttcaatcatcataacccacaacgtctcgccggataccctcaaccgcgagggctgtaaagagtacgacgtcgcccctgaggttggacacaagttctgcaaggacttccccggcttcataccaagcctcctgggagatttgctcgaggagaggagcaagatagagcggaagatgaaggcaacggttgacccgctggagaagaaactcctcgtgtacaggcagtggcttataaaaatcctcgccaacagcttctacggctactacggctacgccaaggcccggtggtactgcaaggagtgcgccgagagcgttacggcctggggaagggagtatatagaaatggttatccgggaactcgaagaaaaattcggttttaaagttctctatgccgatacagacggtctccatgctaccattcccggagcagacgctgaaacagtcaagaaaaaagcaaaggagttcttaaaatacattaatccaaaactgcccggcctgctcgaacttgagtacgagggcttctacgtgaggggcttcttcgtcacgaagaagaagtacgctgtgatagacgaggagggcaagataaccacgaggggtcttgagattgtgaggcgcgactggagcgagatagcgaaggagacccaggccagggtcttagaggcgatactcaagcacggtgacgtcgaggaggccgttaggatagtcaaggaagtgacggaaaagctgagcaagtatgaggtcccgcccgagaagctggtaatccacgagcagataacgcgcgatttgagggattacaaagccaccggcccgcacgttgccgttgcgaagaggctcgcggcgcgtggagtgaaaatccggcccggcacggtgataagctacatcgtcctaaagggctctggaaggataggcgacagggcgattccagctgatgagttcgacccgacgaagcaccgctacgatgcggaatactacatcgagaaccaggttctcccggcggtggagaggattctaaaagccttcggctatcggaaggaggatttgcgctaccagaagacgaagcaggtcggctcgggcgcgtggctgaaggtgaaggggaagaagggtaccgaagcttacgtagaacaaaaactcatctcagaagaggatctgaatagcgccgtcgaccatcatcatcatcatcattga

SEQ ID NO: 476 - protein, 802 aa, Artificial Sequence
  Description of Artificial Sequence:Thermococcus species 9degreesN-7 mutant DNA polymerase, 9degreesN mutant
MILDTDYITENGKPVIRVFKKENGEFKIEYDRTFEPYFYALLKDDSAIEDVKKVTAKRHGTVVKVKRAEKVQKKFLGRPIEVWKLYFNHPQDVPAIRDRIRAHPAVVDIYEYDIPFAKRYLIDKGLIPMEGDEELTMLAFAIATLYHEGEEFGTGPILMISYADGSEARVITWKKIDLPYVDVVSTEKEMIKRFLRVVREKDPDVLITYNGDNFDFAYLKKRCEELGIKFTLGRDGSEPKIQRMGDRFAVEVKGRIHFDLYPVIRRTINLPTYTLEAVYEAVFGKPKEKVYAEEIAQAWESGEGLERVARYSMEDAKVTYELGREFFPMEAQLSRLIGQSLWDVSRSSTGNLVEAFLLRKAYKRNELAPNKPDERELARRRGGYAGGYVKEPERGLWDNIVYLDFRSWYPSIIITHNVSPDTLNREGCKEYDVAPEVGHKFCKDFPGFIPSLLGDLLEERSKIERKMKATVDPLEKKLLVYRQWLIKILANSFYGYYGYAKARWYCKECAESVTAWGREYIEMVIRELEEKFGFKVLYADTDGLHATIPGADAETVKKKAKEFLKYINPKLPGLLELEYEGFYVRGFFVTKKKYAVIDEEGKITTRGLEIVRRDWSEIAKETQARVLEAILKHGDVEEAVRIVKEVTEKLSKYEVPPEKLVIHEQITRDLRDYKATGPHVAVAKRLAARGVKIRPGTVISYIVLKGSGRIGDRAIPADEFDPTKHRYDAEYYIENQVLPAVERILKAFGYRKEDLRYQKTKQVGSGAWLKVKGKKGTEAYVEQKLISEEDLNSAVDHHHHHH

SEQ ID NO: 477 - DNA, 2409 bp, Artificial Sequence
  Description of Artificial Sequence:Thermococcus species 9degreesN-7 mutant DNA polymerase, 9degreesN mutant
atgattctcgataccgactacatcaccgagaacgggaagcccgtgataagggtcttcaagaaggagaacggcgagtttaaaatcgagtacgacagaaccttcgagccctacttctacgcccttctgaaggacgattctgcgatagaggacgtcaagaaggtaaccgcaaagaggcacggaacggttgtcaaggtgaagcgcgccgagaaggtgcagaagaagttcctcggcaggccgatagaggtctggaagctctacttcaaccatcctcaggacgtcccggcgattcgagacaggatacgcgcccaccccgctgtcgttgacatctacgagtacgacatacccttcgccaagcgctacctcatcgacaagggcctgattccgatggagggcgacgaggagcttacgatgctcgccttcgcgatcgcaaccctctatcacgagggcgaggagttcggaaccgggccgattctcatgataagctacgccgacgggagcgaggcgagggtgataacctggaagaagattgaccttccgtacgttgacgtcgtctcgaccgagaaggagatgattaagcgcttcctccgcgtcgtcagggagaaggaccccgacgtgctcatcacctacaacggcgacaacttcgacttcgcctacctgaagaagcgctgtgaggaactcggaataaagttcacactcggcagggacgggagcgagccgaagatacagcgaatgggcgaccgctttgccgttgaggtgaagggcaggattcacttcgacctctaccccgtcataaggcgcacgataaacctcccgacctacacccttgaggccgtttacgaggccgtctttggaaagcccaaggagaaggtttacgcagaggagatagcgcaggcctgggagagcggggagggccttgaaagggttgcaagatactcgatggaggacgctaaggtgacctacgagctgggaagggagttcttcccgatggaggcccagctttcgaggcttataggccagagcctctgggacgtctcgcgctcgagcaccggaaatttggtggaggcattcctcctgcggaaggcctacaagaggaacgagctcgccccaaacaagcccgacgagagggagctcgcgagacggcgcgggggctacgctggcgggtacgttaaggaaccagagcggggattgtgggacaacattgtgtatttagacttccgctcgtggtatccttcaatcatcataacccacaacgtctcgccggataccctcaaccgcgagggctgtaaagagtacgacgtcgcccctgaggttggacacaagttctgcaaggacttccccggcttcataccaagcctcctgggagatttgctcgaggagccccagaagatagagcggaagatgaaggcaacggttgacccgctggagaagaaactcctcgtgtacaggcagtggcttataaaaatcctcgccaacagcttctacggctactacggctacgccaaggcccggtggtactgcaaggagtgcgccgagagcgttacggcctggggaagggagtatatagaaatggttatccgggaactcgaagaaaaattcggttttaaagttctctatgccgatacagacggtctccatgctaccattcccggagcagacgctgaaacagtcaagaaaaaagcaaaggagttcttaaaatacattaatccaaaactgcccggcctgctcgaacttgagtacgagggcttctacgtgaggggcttcttcgtcacgaagaagaagtacgctgtgatagacgaggagggcaagataaccacgaggggtcttgagattgtgaggcgcgactggagcgagatagcgaaggagacccaggccagggtcttagaggcgatactcaagcacggtgacgtcgaggaggccgttaggatagtcaaggaagtgacggaaaagctgagcaagtatgaggtcccgcccgagaagctggtaatccacgagcagataacgcgcgatttgagggattacaaagccaccggcccgcacgttgccgttgcgaagaggctcgcggcgcgtggagtgaaaatccggcccggcacggtgataagctacatcgtcctaaagggctctggaaggataggcgacagggcgattccagctgatgagttcgacccgacgaagcaccgctacgatgcggaatactacatcgagaaccaggttctcccggcggtggagaggattctaaaagccttcggctatcggaaggaggatttgcgctaccagaagacgaagcaggtcggctcgggcgcgtggctgaaggtgaaggggaagaagggtaccgaagcttacgtagaacaaaaactcatctcagaagaggatctgaatagcgccgtcgaccatcatcatcatcatcattga

SEQ ID NO: 478 - protein, 802 aa, Artificial Sequence
  Description of Artificial Sequence:Thermococcus species 9degreesN-7 mutant DNA polymerase, 9degreesN mutant
MILDTDYITENGKPVIRVFKKENGEFKIEYDRTFEPYFYALLKDDSAIEDVKKVTAKRHGTVVKVKRAEKVQKKFLGRPIEVWKLYFNHPQDVPAIRDRIRAHPAVVDIYEYDIPFAKRYLIDKGLIPMEGDEELTMLAFAIATLYHEGEEFGTGPILMISYADGSEARVITWKKIDLPYVDVVSTEKEMIKRFLRVVREKDPDVLITYNGDNFDFAYLKKRCEELGIKFTLGRDGSEPKIQRMGDRFAVEVKGRIHFDLYPVIRRTINLPTYTLEAVYEAVFGKPKEKVYAEEIAQAWESGEGLERVARYSMEDAKVTYELGREFFPMEAQLSRLIGQSLWDVSRSSTGNLVEAFLLRKAYKRNELAPNKPDERELARRRGGYAGGYVKEPERGLWDNIVYLDFRSWYPSIIITHNVSPDTLNREGCKEYDVAPEVGHKFCKDFPGFIPSLLGDLLEEPQKIERKMKATVDPLEKKLLVYRQWLIKILANSFYGYYGYAKARWYCKECAESVTAWGREYIEMVIRELEEKFGFKVLYADTDGLHATIPGADAETVKKKAKEFLKYINPKLPGLLELEYEGFYVRGFFVTKKKYAVIDEEGKITTRGLEIVRRDWSEIAKETQARVLEAILKHGDVEEAVRIVKEVTEKLSKYEVPPEKLVIHEQITRDLRDYKATGPHVAVAKRLAARGVKIRPGTVISYIVLKGSGRIGDRAIPADEFDPTKHRYDAEYYIENQVLPAVERILKAFGYRKEDLRYQKTKQVGSGAWLKVKGKKGTEAYVEQKLISEEDLNSAVDHHHHHH

SEQ ID NO: 479 - DNA, 2409 bp, Artificial Sequence
  Description of Artificial Sequence:Thermococcus species 9degreesN-7 mutant DNA polymerase, 9degreesN mutant
atgattctcgataccgactacatcaccgagaacgggaagcccgtgataagggtcttcaagaaggagaacggcgagtttaaaatcgagtacgacagaaccttcgagccctacttctacgcccttctgaaggacgattctgcgatagaggacgtcaagaaggtaaccgcaaagaggcacggaacggttgtcaaggtgaagcgcgccgagaaggtgcagaagaagttcctcggcaggccgatagaggtctggaagctctacttcaaccatcctcaggacgtcccggcgattcgagacaggatacgcgcccaccccgctgtcgttgacatctacgagtacgacatacccttcgccaagcgctacctcatcgacaagggcctgattccgatggagggcgacgaggagcttacgatgctcgccttcgcgatcgcaaccctctatcacgagggcgaggagttcggaaccgggccgattctcatgataagctacgccgacgggagcgaggcgagggtgataacctggaagaagattgaccttccgtacgttgacgtcgtctcgaccgagaaggagatgattaagcgcttcctccgcgtcgtcagggagaaggaccccgacgtgctcatcacctacaacggcgacaacttcgacttcgcctacctgaagaagcgctgtgaggaactcggaataaagttcacactcggcagggacgggagcgagccgaagatacagcgaatgggcgaccgctttgccgttgaggtgaagggcaggattcacttcgacctctaccccgtcataaggcgcacgataaacctcccgacctacacccttgaggccgtttacgaggccgtctttggaaagcccaaggagaaggtttacgcagaggagatagcgcaggcctgggagagcggggagggccttgaaagggttgcaagatactcgatggaggacgctaaggtgacctacgagctgggaagggagttcttcccgatggaggcccagctttcgaggcttataggccagagcctctgggacgtctcgcgctcgagcaccggaaatttggtggaggcattcctcctgcggaaggcctacaagaggaacgagctcgccccaaacaagcccgacgagagggagctcgcgagacggcgcgggggctacgctggcgggtacgttaaggaaccagagcggggattgtgggacaacattgtgtatttagacttccgctcgtggtatccttcaatcatcataacccacaacgtctcgccggataccctcaaccgcgagggctgtaaagagtacgacgtcgcccctgaggttggacacaagttctgcaaggacttccccggcttcataccaagcctcctgggagatttgctcgaggagaaacagaagatagagcggaagatgaaggcaacggttgacccgctggagaagaaactcctcgtgtacaggcagtggcttataaaaatcctcgccaacagcttctacggctactacggctacgccaaggcccggtggtactgcaaggagtgcgccgagagcgttacggcctggggaagggagtatatagaaatggttatccgggaactcgaagaaaaattcggttttaaagttctctatgccgatacagacggtctccatgctaccattcccggagcagacgctgaaacagtcaagaaaaaagcaaaggagttcttaaaatacattaatccaaaactgcccggcctgctcgaacttgagtacgagggcttctacgtgaggggcttcttcgtcacgaagaagaagtacgctgtgatagacgaggagggcaagataaccacgaggggtcttgagattgtgaggcgcgactggagcgagatagcgaaggagacccaggccagggtcttagaggcgatactcaagcacggtgacgtcgaggaggccgttaggatagtcaaggaagtgacggaaaagctgagcaagtatgaggtcccgcccgagaagctggtaatccacgagcagataacgcgcgatttgagggattacaaagccaccggcccgcacgttgccgttgcgaagaggctcgcggcgcgtggagtgaaaatccggcccggcacggtgataagctacatcgtcctaaagggctctggaaggataggcgacagggcgattccagctgatgagttcgacccgacgaagcaccgctacgatgcggaatactacatcgagaaccaggttctcccggcggtggagaggattctaaaagccttcggctatcggaaggaggatttgcgctaccagaagacgaagcaggtcggctcgggcgcgtggctgaaggtgaaggggaagaagggtaccgaagcttacgtagaacaaaaactcatctcagaagaggatctgaatagcgccgtcgaccatcatcatcatcatcattga

SEQ ID NO: 480 - protein, 802 aa, Artificial Sequence
  Description of Artificial Sequence:Thermococcus species 9degreesN-7 mutant DNA polymerase, 9degreesN mutant
MILDTDYITENGKPVIRVFKKENGEFKIEYDRTFEPYFYALLKDDSAIEDVKKVTAKRHGTVVKVKRAEKVQKKFLGRPIEVWKLYFNHPQDVPAIRDRIRAHPAVVDIYEYDIPFAKRYLIDKGLIPMEGDEELTMLAFAIATLYHEGEEFGTGPILMISYADGSEARVITWKKIDLPYVDVVSTEKEMIKRFLRVVREKDPDVLITYNGDNFDFAYLKKRCEELGIKFTLGRDGSEPKIQRMGDRFAVEVKGRIHFDLYPVIRRTINLPTYTLEAVYEAVFGKPKEKVYAEEIAQAWESGEGLERVARYSMEDAKVTYELGREFFPMEAQLSRLIGQSLWDVSRSSTGNLVEAFLLRKAYKRNELAPNKPDERELARRRGGYAGGYVKEPERGLWDNIVYLDFRSWYPSIIITHNVSPDTLNREGCKEYDVAPEVGHKFCKDFPGFIPSLLGDLLEEKQKIERKMKATVDPLEKKLLVYRQWLIKILANSFYGYYGYAKARWYCKECAESVTAWGREYIEMVIRELEEKFGFKVLYADTDGLHATIPGADAETVKKKAKEFLKYINPKLPGLLELEYEGFYVRGFFVTKKKYAVIDEEGKITTRGLEIVRRDWSEIAKETQARVLEAILKHGDVEEAVRIVKEVTEKLSKYEVPPEKLVIHEQITRDLRDYKATGPHVAVAKRLAARGVKIRPGTVISYIVLKGSGRIGDRAIPADEFDPTKHRYDAEYYIENQVLPAVERILKAFGYRKEDLRYQKTKQVGSGAWLKVKGKKGTEAYVEQKLISEEDLNSAVDHHHHHH

SEQ ID NO: 481 - DNA, 2409 bp, Artificial Sequence
  Description of Artificial Sequence:Thermococcus species 9degreesN-7 mutant DNA polymerase, 9degreesN mutant
atgattctcgataccgactacatcaccgagaacgggaagcccgtgataagggtcttcaagaaggagaacggcgagtttaaaatcgagtacgacagaaccttcgagccctacttctacgcccttctgaaggacgattctgcgatagaggacgtcaagaaggtaaccgcaaagaggcacggaacggttgtcaaggtgaagcgcgccgagaaggtgcagaagaagttcctcggcaggccgatagaggtctggaagctctacttcaaccatcctcaggacgtcccggcgattcgagacaggatacgcgcccaccccgctgtcgttgacatctacgagtacgacatacccttcgccaagcgctacctcatcgacaagggcctgattccgatggagggcgacgaggagcttacgatgctcgccttcgcgatcgcaaccctctatcacgagggcgaggagttcggaaccgggccgattctcatgataagctacgccgacgggagcgaggcgagggtgataacctggaagaagattgaccttccgtacgttgacgtcgtctcgaccgagaaggagatgattaagcgcttcctccgcgtcgtcagggagaaggaccccgacgtgctcatcacctacaacggcgacaacttcgacttcgcctacctgaagaagcgctgtgaggaactcggaataaagttcacactcggcagggacgggagcgagccgaagatacagcgaatgggcgaccgctttgccgttgaggtgaagggcaggattcacttcgacctctaccccgtcataaggcgcacgataaacctcccgacctacacccttgaggccgtttacgaggccgtctttggaaagcccaaggagaaggtttacgcagaggagatagcgcaggcctgggagagcggggagggccttgaaagggttgcaagatactcgatggaggacgctaaggtgacctacgagctgggaagggagttcttcccgatggaggcccagctttcgaggcttataggccagagcctctgggacgtctcgcgctcgagcaccggaaatttggtggaggcattcctcctgcggaaggcctacaagaggaacgagctcgccccaaacaagcccgacgagagggagctcgcgagacggcgcgggggctacgctggcgggtacgttaaggaaccagagcggggattgtgggacaacattgtgtatttagacttccgctcgtggtatccttcaatcatcataacccacaacgtctcgccggataccctcaaccgcgagggctgtaaagagtacgacgtcgcccctgaggttggacacaagttctgcaaggacttccccggcttcataccaagcctcctgggagatttgctcgaggagagtcagaagatagagcggaagatgaaggcaacggttgacccgctggagaagaaactcctcgtgtacaggcagtggcttataaaaatcctcgccaacagcttctacggctactacggctacgccaaggcccggtggtactgcaaggagtgcgccgagagcgttacggcctggggaagggagtatatagaaatggttatccgggaactcgaagaaaaattcggttttaaagttctctatgccgatacagacggtctccatgctaccattcccggagcagacgctgaaacagtcaagaaaaaagcaaaggagttcttaaaatacattaatccaaaactgcccggcctgctcgaacttgagtacgagggcttctacgtgaggggcttcttcgtcacgaagaagaagtacgctgtgatagacgaggagggcaagataaccacgaggggtcttgagattgtgaggcgcgactggagcgagatagcgaaggagacccaggccagggtcttagaggcgatactcaagcacggtgacgtcgaggaggccgttaggatagtcaaggaagtgacggaaaagctgagcaagtatgaggtcccgcccgagaagctggtaatccacgagcagataacgcgcgatttgagggattacaaagccaccggcccgcacgttgccgttgcgaagaggctcgcggcgcgtggagtgaaaatccggcccggcacggtgataagctacatcgtcctaaagggctctggaaggataggcgacagggcgattccagctgatgagttcgacccgacgaagcaccgctacgatgcggaatactacatcgagaaccaggttctcccggcggtggagaggattctaaaagccttcggctatcggaaggaggatttgcgctaccagaagacgaagcaggtcggctcgggcgcgtggctgaaggtgaaggggaagaagggtaccgaagcttacgtagaacaaaaactcatctcagaagaggatctgaatagcgccgtcgaccatcatcatcatcatcattga

SEQ ID NO: 482 - protein, 802 aa, Artificial Sequence
  Description of Artificial Sequence:Thermococcus species 9degreesN-7 mutant DNA polymerase, 9degreesN mutant
MILDTDYITENGKPVIRVFKKENGEFKIEYDRTFEPYFYALLKDDSAIEDVKKVTAKRHGTVVKVKRAEKVQKKFLGRPIEVWKLYFNHPQDVPAIRDRIRAHPAVVDIYEYDIPFAKRYLIDKGLIPMEGDEELTMLAFAIATLYHEGEEFGTGPILMISYADGSEARVITWKKIDLPYVDVVSTEKEMIKRFLRVVREKDPDVLITYNGDNFDFAYLKKRCEELGIKFTLGRDGSEPKIQRMGDRFAVEVKGRIHFDLYPVIRRTINLPTYTLEAVYEAVFGKPKEKVYAEEIAQAWESGEGLERVARYSMEDAKVTYELGREFFPMEAQLSRLIGQSLWDVSRSSTGNLVEAFLLRKAYKRNELAPNKPDERELARRRGGYAGGYVKEPERGLWDNIVYLDFRSWYPSIIITHNVSPDTLNREGCKEYDVAPEVGHKFCKDFPGFIPSLLGDLLEESQKIERKMKATVDPLEKKLLVYRQWLIKILANSFYGYYGYAKARWYCKECAESVTAWGREYIEMVIRELEEKFGFKVLYADTDGLHATIPGADAETVKKKAKEFLKYINPKLPGLLELEYEGFYVRGFFVTKKKYAVIDEEGKITTRGLEIVRRDWSEIAKETQARVLEAILKHGDVEEAVRIVKEVTEKLSKYEVPPEKLVIHEQITRDLRDYKATGPHVAVAKRLAARGVKIRPGTVISYIVLKGSGRIGDRAIPADEFDPTKHRYDAEYYIENQVLPAVERILKAFGYRKEDLRYQKTKQVGSGAWLKVKGKKGTEAYVEQKLISEEDLNSAVDHHHHHH

SEQ ID NO: 483 - DNA, 2409 bp, Artificial Sequence
  Description of Artificial Sequence:Thermococcus species 9degreesN-7 mutant DNA polymerase, 9degreesN mutant
atgattctcgataccgactacatcaccgagaacgggaagcccgtgataagggtcttcaagaaggagaacggcgagtttaaaatcgagtacgacagaaccttcgagccctacttctacgcccttctgaaggacgattctgcgatagaggacgtcaagaaggtaaccgcaaagaggcacggaacggttgtcaaggtgaagcgcgccgagaaggtgcagaagaagttcctcggcaggccgatagaggtctggaagctctacttcaaccatcctcaggacgtcccggcgattcgagacaggatacgcgcccaccccgctgtcgttgacatctacgagtacgacatacccttcgccaagcgctacctcatcgacaagggcctgattccgatggagggcgacgaggagcttacgatgctcgccttcgcgatcgcaaccctctatcacgagggcgaggagttcggaaccgggccgattctcatgataagctacgccgacgggagcgaggcgagggtgataacctggaagaagattgaccttccgtacgttgacgtcgtctcgaccgagaaggagatgattaagcgcttcctccgcgtcgtcagggagaaggaccccgacgtgctcatcacctacaacggcgacaacttcgacttcgcctacctgaagaagcgctgtgaggaactcggaataaagttcacactcggcagggacgggagcgagccgaagatacagcgaatgggcgaccgctttgccgttgaggtgaagggcaggattcacttcgacctctaccccgtcataaggcgcacgataaacctcccgacctacacccttgaggccgtttacgaggccgtctttggaaagcccaaggagaaggtttacgcagaggagatagcgcaggcctgggagagcggggagggccttgaaagggttgcaagatactcgatggaggacgctaaggtgacctacgagctgggaagggagttcttcccgatggaggcccagctttcgaggcttataggccagagcctctgggacgtctcgcgctcgagcaccggaaatttggtggaggcattcctcctgcggaaggcctacaagaggaacgagctcgccccaaacaagcccgacgagagggagctcgcgagacggcgcgggggctacgctggcgggtacgttaaggaaccagagcggggattgtgggacaacattgtgtatttagacttccgctcgtggtatccttcaatcatcataacccacaacgtctcgccggataccctcaaccgcgagggctgtaaagagtacgacgtcgcccctgaggttggacacaagttctgcaaggacttccccggcttcataccaagcctcctgggagatttgctcgaggaggggcagaagatagagcggaagatgaaggcaacggttgacccgctggagaagaaactcctcgtgtacaggcagtggcttataaaaatcctcgccaacagcttctacggctactacggctacgccaaggcccggtggtactgcaaggagtgcgccgagagcgttacggcctggggaagggagtatatagaaatggttatccgggaactcgaagaaaaattcggttttaaagttctctatgccgatacagacggtctccatgctaccattcccggagcagacgctgaaacagtcaagaaaaaagcaaaggagttcttaaaatacattaatccaaaactgcccggcctgctcgaacttgagtacgagggcttctacgtgaggggcttcttcgtcacgaagaagaagtacgctgtgatagacgaggagggcaagataaccacgaggggtcttgagattgtgaggcgcgactggagcgagatagcgaaggagacccaggccagggtcttagaggcgatactcaagcacggtgacgtcgaggaggccgttaggatagtcaaggaagtgacggaaaagctgagcaagtatgaggtcccgcccgagaagctggtaatccacgagcagataacgcgcgatttgagggattacaaagccaccggcccgcacgttgccgttgcgaagaggctcgcggcgcgtggagtgaaaatccggcccggcacggtgataagctacatcgtcctaaagggctctggaaggataggcgacagggcgattccagctgatgagttcgacccgacgaagcaccgctacgatgcggaatactacatcgagaaccaggttctcccggcggtggagaggattctaaaagccttcggctatcggaaggaggatttgcgctaccagaagacgaagcaggtcggctcgggcgcgtggctgaaggtgaaggggaagaagggtaccgaagcttacgtagaacaaaaactcatctcagaagaggatctgaatagcgccgtcgaccatcatcatcatcatcattga

SEQ ID NO: 484 - protein, 802 aa, Artificial Sequence
  Description of Artificial Sequence:Thermococcus species 9degreesN-7 mutant DNA polymerase, 9degreesN mutant
MILDTDYITENGKPVIRVFKKENGEFKIEYDRTFEPYFYALLKDDSAIEDVKKVTAKRHGTVVKVKRAEKVQKKFLGRPIEVWKLYFNHPQDVPAIRDRIRAHPAVVDIYEYDIPFAKRYLIDKGLIPMEGDEELTMLAFAIATLYHEGEEFGTGPILMISYADGSEARVITWKKIDLPYVDVVSTEKEMIKRFLRVVREKDPDVLITYNGDNFDFAYLKKRCEELGIKFTLGRDGSEPKIQRMGDRFAVEVKGRIHFDLYPVIRRTINLPTYTLEAVYEAVFGKPKEKVYAEEIAQAWESGEGLERVARYSMEDAKVTYELGREFFPMEAQLSRLIGQSLWDVSRSSTGNLVEAFLLRKAYKRNELAPNKPDERELARRRGGYAGGYVKEPERGLWDNIVYLDFRSWYPSIIITHNVSPDTLNREGCKEYDVAPEVGHKFCKDFPGFIPSLLGDLLEEGQKIERKMKATVDPLEKKLLVYRQWLIKILANSFYGYYGYAKARWYCKECAESVTAWGREYIEMVIRELEEKFGFKVLYADTDGLHATIPGADAETVKKKAKEFLKYINPKLPGLLELEYEGFYVRGFFVTKKKYAVIDEEGKITTRGLEIVRRDWSEIAKETQARVLEAILKHGDVEEAVRIVKEVTEKLSKYEVPPEKLVIHEQITRDLRDYKATGPHVAVAKRLAARGVKIRPGTVISYIVLKGSGRIGDRAIPADEFDPTKHRYDAEYYIENQVLPAVERILKAFGYRKEDLRYQKTKQVGSGAWLKVKGKKGTEAYVEQKLISEEDLNSAVDHHHHHH

SEQ ID NO: 485 - DNA, 2409 bp, Artificial Sequence
  Description of Artificial Sequence:Thermococcus species 9degreesN-7 mutant DNA polymerase, 9degreesN mutant
atgattctcgataccgactacatcaccgagaacgggaagcccgtgataagggtcttcaagaaggagaacggcgagtttaaaatcgagtacgacagaaccttcgagccctacttctacgcccttctgaaggacgattctgcgatagaggacgtcaagaaggtaaccgcaaagaggcacggaacggttgtcaaggtgaagcgcgccgagaaggtgcagaagaagttcctcggcaggccgatagaggtctggaagctctacttcaaccatcctcaggacgtcccggcgattcgagacaggatacgcgcccaccccgctgtcgttgacatctacgagtacgacatacccttcgccaagcgctacctcatcgacaagggcctgattccgatggagggcgacgaggagcttacgatgctcgccttcgcgatcgcaaccctctatcacgagggcgaggagttcggaaccgggccgattctcatgataagctacgccgacgggagcgaggcgagggtgataacctggaagaagattgaccttccgtacgttgacgtcgtctcgaccgagaaggagatgattaagcgcttcctccgcgtcgtcagggagaaggaccccgacgtgctcatcacctacaacggcgacaacttcgacttcgcctacctgaagaagcgctgtgaggaactcggaataaagttcacactcggcagggacgggagcgagccgaagatacagcgaatgggcgaccgctttgccgttgaggtgaagggcaggattcacttcgacctctaccccgtcataaggcgcacgataaacctcccgacctacacccttgaggccgtttacgaggccgtctttggaaagcccaaggagaaggtttacgcagaggagatagcgcaggcctgggagagcggggagggccttgaaagggttgcaagatactcgatggaggacgctaaggtgacctacgagctgggaagggagttcttcccgatggaggcccagctttcgaggcttataggccagagcctctgggacgtctcgcgctcgagcaccggaaatttggtggaggcattcctcctgcggaaggcctacaagaggaacgagctcgccccaaacaagcccgacgagagggagctcgcgagacggcgcgggggctacgctggcgggtacgttaaggaaccagagcggggattgtgggacaacattgtgtatttagacttccgctcgtggtatccttcaatcatcataacccacaacgtctcgccggataccctcaaccgcgagggctgtaaagagtacgacgtcgcccctgaggttggacacaagttctgcaaggacttccccggcttcataccaagcctcctgggagatttgctcgaggagaggcagaagatagagcggaagatgaaggcaacggttgacccgctggagaagaaactcctcgtgtacaggcagtggcttataaaaatcctcgccaacagcttctacggctacacaggctacgccaaggcccggtggtactgcaaggagtgcgccgagagcgttacggcctggggaagggagtatatagaaatggttatccgggaactcgaagaaaaattcggttttaaagttctctatgccgatacagacggtctccatgctaccattcccggagcagacgctgaaacagtcaagaaaaaagcaaaggagttcttaaaatacattaatccaaaactgcccggcctgctcgaacttgagtacgagggcttctacgtgaggggcttcttcgtcacgaagaagaagtacgctgtgatagacgaggagggcaagataaccacgaggggtcttgagattgtgaggcgcgactggagcgagatagcgaaggagacccaggccagggtcttagaggcgatactcaagcacggtgacgtcgaggaggccgttaggatagtcaaggaagtgacggaaaagctgagcaagtatgaggtcccgcccgagaagctggtaatccacgagcagataacgcgcgatttgagggattacaaagccaccggcccgcacgttgccgttgcgaagaggctcgcggcgcgtggagtgaaaatccggcccggcacggtgataagctacatcgtcctaaagggctctggaaggataggcgacagggcgattccagctgatgagttcgacccgacgaagcaccgctacgatgcggaatactacatcgagaaccaggttctcccggcggtggagaggattctaaaagccttcggctatcggaaggaggatttgcgctaccagaagacgaagcaggtcggctcgggcgcgtggctgaaggtgaaggggaagaagggtaccgaagcttacgtagaacaaaaactcatctcagaagaggatctgaatagcgccgtcgaccatcatcatcatcatcattga

SEQ ID NO: 486 - protein, 802 aa, Artificial Sequence
  Description of Artificial Sequence:Thermococcus species 9degreesN-7 mutant DNA polymerase, 9degreesN mutant
MILDTDYITENGKPVIRVFKKENGEFKIEYDRTFEPYFYALLKDDSAIEDVKKVTAKRHGTVVKVKRAEKVQKKFLGRPIEVWKLYFNHPQDVPAIRDRIRAHPAVVDIYEYDIPFAKRYLIDKGLIPMEGDEELTMLAFAIATLYHEGEEFGTGPILMISYADGSEARVITWKKIDLPYVDVVSTEKEMIKRFLRVVREKDPDVLITYNGDNFDFAYLKKRCEELGIKFTLGRDGSEPKIQRMGDRFAVEVKGRIHFDLYPVIRRTINLPTYTLEAVYEAVFGKPKEKVYAEEIAQAWESGEGLERVARYSMEDAKVTYELGREFFPMEAQLSRLIGQSLWDVSRSSTGNLVEAFLLRKAYKRNELAPNKPDERELARRRGGYAGGYVKEPERGLWDNIVYLDFRSWYPSIIITHNVSPDTLNREGCKEYDVAPEVGHKFCKDFPGFIPSLLGDLLEERQKIERKMKATVDPLEKKLLVYRQWLIKILANSFYGYTGYAKARWYCKECAESVTAWGREYIEMVIRELEEKFGFKVLYADTDGLHATIPGADAETVKKKAKEFLKYINPKLPGLLELEYEGFYVRGFFVTKKKYAVIDEEGKITTRGLEIVRRDWSEIAKETQARVLEAILKHGDVEEAVRIVKEVTEKLSKYEVPPEKLVIHEQITRDLRDYKATGPHVAVAKRLAARGVKIRPGTVISYIVLKGSGRIGDRAIPADEFDPTKHRYDAEYYIENQVLPAVERILKAFGYRKEDLRYQKTKQVGSGAWLKVKGKKGTEAYVEQKLISEEDLNSAVDHHHHHH

SEQ ID NO: 487 - DNA, 2409 bp, Artificial Sequence
  Description of Artificial Sequence:Thermococcus species 9degreesN-7 mutant DNA polymerase, 9degreesN mutant
atgattctcgataccgactacatcaccgagaacgggaagcccgtgataagggtcttcaagaaggagaacggcgagtttaaaatcgagtacgacagaaccttcgagccctacttctacgcccttctgaaggacgattctgcgatagaggacgtcaagaaggtaaccgcaaagaggcacggaacggttgtcaaggtgaagcgcgccgagaaggtgcagaagaagttcctcggcaggccgatagaggtctggaagctctacttcaaccatcctcaggacgtcccggcgattcgagacaggatacgcgcccaccccgctgtcgttgacatctacgagtacgacatacccttcgccaagcgctacctcatcgacaagggcctgattccgatggagggcgacgaggagcttacgatgctcgccttcgcgatcgcaaccctctatcacgagggcgaggagttcggaaccgggccgattctcatgataagctacgccgacgggagcgaggcgagggtgataacctggaagaagattgaccttccgtacgttgacgtcgtctcgaccgagaaggagatgattaagcgcttcctccgcgtcgtcagggagaaggaccccgacgtgctcatcacctacaacggcgacaacttcgacttcgcctacctgaagaagcgctgtgaggaactcggaataaagttcacactcggcagggacgggagcgagccgaagatacagcgaatgggcgaccgctttgccgttgaggtgaagggcaggattcacttcgacctctaccccgtcataaggcgcacgataaacctcccgacctacacccttgaggccgtttacgaggccgtctttggaaagcccaaggagaaggtttacgcagaggagatagcgcaggcctgggagagcggggagggccttgaaagggttgcaagatactcgatggaggacgctaaggtgacctacgagctgggaagggagttcttcccgatggaggcccagctttcgaggcttataggccagagcctctgggacgtctcgcgctcgagcaccggaaatttggtggaggcattcctcctgcggaaggcctacaagaggaacgagctcgccccaaacaagcccgacgagagggagctcgcgagacggcgcgggggctacgctggcgggtacgttaaggaaccagagcggggattgtgggacaacattgtgtatttagacttccgctcgtggtatccttcaatcatcataacccacaacgtctcgccggataccctcaaccgcgagggctgtaaagagtacgacgtcgcccctgaggttggacacaagttctgcaaggacttccccggcttcataccaagcctcctgggagatttgctcgaggagaggcagaagatagagcggaagatgaaggcaacggttgacccgctggagaagaaactcctcgtgtacaggcagtggcttataaaaatcctcgccaacagcttctacggctacatgggctacgccaaggcccggtggtactgcaaggagtgcgccgagagcgttacggcctggggaagggagtatatagaaatggttatccgggaactcgaagaaaaattcggttttaaagttctctatgccgatacagacggtctccatgctaccattcccggagcagacgctgaaacagtcaagaaaaaagcaaaggagttcttaaaatacattaatccaaaactgcccggcctgctcgaacttgagtacgagggcttctacgtgaggggcttcttcgtcacgaagaagaagtacgctgtgatagacgaggagggcaagataaccacgaggggtcttgagattgtgaggcgcgactggagcgagatagcgaaggagacccaggccagggtcttagaggcgatactcaagcacggtgacgtcgaggaggccgttaggatagtcaaggaagtgacggaaaagctgagcaagtatgaggtcccgcccgagaagctggtaatccacgagcagataacgcgcgatttgagggattacaaagccaccggcccgcacgttgccgttgcgaagaggctcgcggcgcgtggagtgaaaatccggcccggcacggtgataagctacatcgtcctaaagggctctggaaggataggcgacagggcgattccagctgatgagttcgacccgacgaagcaccgctacgatgcggaatactacatcgagaaccaggttctcccggcggtggagaggattctaaaagccttcggctatcggaaggaggatttgcgctaccagaagacgaagcaggtcggctcgggcgcgtggctgaaggtgaaggggaagaagggtaccgaagcttacgtagaacaaaaactcatctcagaagaggatctgaatagcgccgtcgaccatcatcatcatcatcattga

SEQ ID NO: 488 - protein, 802 aa, Artificial Sequence
  Description of Artificial Sequence:Thermococcus species 9degreesN-7 mutant DNA polymerase, 9degreesN mutant
MILDTDYITENGKPVIRVFKKENGEFKIEYDRTFEPYFYALLKDDSAIEDVKKVTAKRHGTVVKVKRAEKVQKKFLGRPIEVWKLYFNHPQDVPAIRDRIRAHPAVVDIYEYDIPFAKRYLIDKGLIPMEGDEELTMLAFAIATLYHEGEEFGTGPILMISYADGSEARVITWKKIDLPYVDVVSTEKEMIKRFLRVVREKDPDVLITYNGDNFDFAYLKKRCEELGIKFTLGRDGSEPKIQRMGDRFAVEVKGRIHFDLYPVIRRTINLPTYTLEAVYEAVFGKPKEKVYAEEIAQAWESGEGLERVARYSMEDAKVTYELGREFFPMEAQLSRLIGQSLWDVSRSSTGNLVEAFLLRKAYKRNELAPNKPDERELARRRGGYAGGYVKEPERGLWDNIVYLDFRSWYPSIIITHNVSPDTLNREGCKEYDVAPEVGHKFCKDFPGFIPSLLGDLLEERQKIERKMKATVDPLEKKLLVYRQWLIKILANSFYGYMGYAKARWYCKECAESVTAWGREYIEMVIRELEEKFGFKVLYADTDGLHATIPGADAETVKKKAKEFLKYINPKLPGLLELEYEGFYVRGFFVTKKKYAVIDEEGKITTRGLEIVRRDWSEIAKETQARVLEAILKHGDVEEAVRIVKEVTEKLSKYEVPPEKLVIHEQITRDLRDYKATGPHVAVAKRLAARGVKIRPGTVISYIVLKGSGRIGDRAIPADEFDPTKHRYDAEYYIENQVLPAVERILKAFGYRKEDLRYQKTKQVGSGAWLKVKGKKGTEAYVEQKLISEEDLNSAVDHHHHHH

SEQ ID NO: 489 - DNA, 2409 bp, Artificial Sequence
  Description of Artificial Sequence:Thermococcus species 9degreesN-7 mutant DNA polymerase, 9degreesN mutant
atgattctcgataccgactacatcaccgagaacgggaagcccgtgataagggtcttcaagaaggagaacggcgagtttaaaatcgagtacgacagaaccttcgagccctacttctacgcccttctgaaggacgattctgcgatagaggacgtcaagaaggtaaccgcaaagaggcacggaacggttgtcaaggtgaagcgcgccgagaaggtgcagaagaagttcctcggcaggccgatagaggtctggaagctctacttcaaccatcctcaggacgtcccggcgattcgagacaggatacgcgcccaccccgctgtcgttgacatctacgagtacgacatacccttcgccaagcgctacctcatcgacaagggcctgattccgatggagggcgacgaggagcttacgatgctcgccttcgcgatcgcaaccctctatcacgagggcgaggagttcggaaccgggccgattctcatgataagctacgccgacgggagcgaggcgagggtgataacctggaagaagattgaccttccgtacgttgacgtcgtctcgaccgagaaggagatgattaagcgcttcctccgcgtcgtcagggagaaggaccccgacgtgctcatcacctacaacggcgacaacttcgacttcgcctacctgaagaagcgctgtgaggaactcggaataaagttcacactcggcagggacgggagcgagccgaagatacagcgaatgggcgaccgctttgccgttgaggtgaagggcaggattcacttcgacctctaccccgtcataaggcgcacgataaacctcccgacctacacccttgaggccgtttacgaggccgtctttggaaagcccaaggagaaggtttacgcagaggagatagcgcaggcctgggagagcggggagggccttgaaagggttgcaagatactcgatggaggacgctaaggtgacctacgagctgggaagggagttcttcccgatggaggcccagctttcgaggcttataggccagagcctctgggacgtctcgcgctcgagcaccggaaatttggtggaggcattcctcctgcggaaggcctacaagaggaacgagctcgccccaaacaagcccgacgagagggagctcgcgagacggcgcgggggctacgctggcgggtacgttaaggaaccagagcggggattgtgggacaacattgtgtatttagacttccgctcgtggtatccttcaatcatcataacccacaacgtctcgccggataccctcaaccgcgagggctgtaaagagtacgacgtcgcccctgaggttggacacaagttctgcaaggacttccccggcttcataccaagcctcctgggagatttgctcgaggagaggcagaagatagagcggaagatgaaggcaacggttgacccgctggagaagaaactcctcgtgtacaggcagtggcttataaaaatcctcgccaacagcttctacggctacctcggctacgccaaggcccggtggtactgcaaggagtgcgccgagagcgttacggcctggggaagggagtatatagaaatggttatccgggaactcgaagaaaaattcggttttaaagttctctatgccgatacagacggtctccatgctaccattcccggagcagacgctgaaacagtcaagaaaaaagcaaaggagttcttaaaatacattaatccaaaactgcccggcctgctcgaacttgagtacgagggcttctacgtgaggggcttcttcgtcacgaagaagaagtacgctgtgatagacgaggagggcaagataaccacgaggggtcttgagattgtgaggcgcgactggagcgagatagcgaaggagacccaggccagggtcttagaggcgatactcaagcacggtgacgtcgaggaggccgttaggatagtcaaggaagtgacggaaaagctgagcaagtatgaggtcccgcccgagaagctggtaatccacgagcagataacgcgcgatttgagggattacaaagccaccggcccgcacgttgccgttgcgaagaggctcgcggcgcgtggagtgaaaatccggcccggcacggtgataagctacatcgtcctaaagggctctggaaggataggcgacagggcgattccagctgatgagttcgacccgacgaagcaccgctacgatgcggaatactacatcgagaaccaggttctcccggcggtggagaggattctaaaagccttcggctatcggaaggaggatttgcgctaccagaagacgaagcaggtcggctcgggcgcgtggctgaaggtgaaggggaagaagggtaccgaagcttacgtagaacaaaaactcatctcagaagaggatctgaatagcgccgtcgaccatcatcatcatcatcattga

SEQ ID NO: 490 - protein, 802 aa, Artificial Sequence
  Description of Artificial Sequence:Thermococcus species 9degreesN-7 mutant DNA polymerase, 9degreesN mutant
MILDTDYITENGKPVIRVFKKENGEFKIEYDRTFEPYFYALLKDDSAIEDVKKVTAKRHGTVVKVKRAEKVQKKFLGRPIEVWKLYFNHPQDVPAIRDRIRAHPAVVDIYEYDIPFAKRYLIDKGLIPMEGDEELTMLAFAIATLYHEGEEFGTGPILMISYADGSEARVITWKKIDLPYVDVVSTEKEMIKRFLRVVREKDPDVLITYNGDNFDFAYLKKRCEELGIKFTLGRDGSEPKIQRMGDRFAVEVKGRIHFDLYPVIRRTINLPTYTLEAVYEAVFGKPKEKVYAEEIAQAWESGEGLERVARYSMEDAKVTYELGREFFPMEAQLSRLIGQSLWDVSRSSTGNLVEAFLLRKAYKRNELAPNKPDERELARRRGGYAGGYVKEPERGLWDNIVYLDFRSWYPSIIITHNVSPDTLNREGCKEYDVAPEVGHKFCKDFPGFIPSLLGDLLEERQKIERKMKATVDPLEKKLLVYRQWLIKILANSFYGYLGYAKARWYCKECAESVTAWGREYIEMVIRELEEKFGFKVLYADTDGLHATIPGADAETVKKKAKEFLKYINPKLPGLLELEYEGFYVRGFFVTKKKYAVIDEEGKITTRGLEIVRRDWSEIAKETQARVLEAILKHGDVEEAVRIVKEVTEKLSKYEVPPEKLVIHEQITRDLRDYKATGPHVAVAKRLAARGVKIRPGTVISYIVLKGSGRIGDRAIPADEFDPTKHRYDAEYYIENQVLPAVERILKAFGYRKEDLRYQKTKQVGSGAWLKVKGKKGTEAYVEQKLISEEDLNSAVDHHHHHH

SEQ ID NO: 491 - DNA, 2409 bp, Artificial Sequence
  Description of Artificial Sequence:Thermococcus species 9degreesN-7 mutant DNA polymerase, 9degreesN mutant
atgattctcgataccgactacatcaccgagaacgggaagcccgtgataagggtcttcaagaaggagaacggcgagtttaaaatcgagtacgacagaaccttcgagccctacttctacgcccttctgaaggacgattctgcgatagaggacgtcaagaaggtaaccgcaaagaggcacggaacggttgtcaaggtgaagcgcgccgagaaggtgcagaagaagttcctcggcaggccgatagaggtctggaagctctacttcaaccatcctcaggacgtcccggcgattcgagacaggatacgcgcccaccccgctgtcgttgacatctacgagtacgacatacccttcgccaagcgctacctcatcgacaagggcctgattccgatggagggcgacgaggagcttacgatgctcgccttcgcgatcgcaaccctctatcacgagggcgaggagttcggaaccgggccgattctcatgataagctacgccgacgggagcgaggcgagggtgataacctggaagaagattgaccttccgtacgttgacgtcgtctcgaccgagaaggagatgattaagcgcttcctccgcgtcgtcagggagaaggaccccgacgtgctcatcacctacaacggcgacaacttcgacttcgcctacctgaagaagcgctgtgaggaactcggaataaagttcacactcggcagggacgggagcgagccgaagatacagcgaatgggcgaccgctttgccgttgaggtgaagggcaggattcacttcgacctctaccccgtcataaggcgcacgataaacctcccgacctacacccttgaggccgtttacgaggccgtctttggaaagcccaaggagaaggtttacgcagaggagatagcgcaggcctgggagagcggggagggccttgaaagggttgcaagatactcgatggaggacgctaaggtgacctacgagctgggaagggagttcttcccgatggaggcccagctttcgaggcttataggccagagcctctgggacgtctcgcgctcgagcaccggaaatttggtggaggcattcctcctgcggaaggcctacaagaggaacgagctcgccccaaacaagcccgacgagagggagctcgcgagacggcgcgggggctacgctggcgggtacgttaaggaaccagagcggggattgtgggacaacattgtgtatttagacttccgctcgtggtatccttcaatcatcataacccacaacgtctcgccggataccctcaaccgcgagggctgtaaagagtacgacgtcgcccctgaggttggacacaagttctgcaaggacttccccggcttcataccaagcctcctgggagatttgctcgaggagaggcagaagatagagcggaagatgaaggcaacggttgacccgctggagaagaaactcctcgtgtacaggcagtggcttataaaaatcctcgccaacagcttctacggctacagtggctacgccaaggcccggtggtactgcaaggagtgcgccgagagcgttacggcctggggaagggagtatatagaaatggttatccgggaactcgaagaaaaattcggttttaaagttctctatgccgatacagacggtctccatgctaccattcccggagcagacgctgaaacagtcaagaaaaaagcaaaggagttcttaaaatacattaatccaaaactgcccggcctgctcgaacttgagtacgagggcttctacgtgaggggcttcttcgtcacgaagaagaagtacgctgtgatagacgaggagggcaagataaccacgaggggtcttgagattgtgaggcgcgactggagcgagatagcgaaggagacccaggccagggtcttagaggcgatactcaagcacggtgacgtcgaggaggccgttaggatagtcaaggaagtgacggaaaagctgagcaagtatgaggtcccgcccgagaagctggtaatccacgagcagataacgcgcgatttgagggattacaaagccaccggcccgcacgttgccgttgcgaagaggctcgcggcgcgtggagtgaaaatccggcccggcacggtgataagctacatcgtcctaaagggctctggaaggataggcgacagggcgattccagctgatgagttcgacccgacgaagcaccgctacgatgcggaatactacatcgagaaccaggttctcccggcggtggagaggattctaaaagccttcggctatcggaaggaggatttgcgctaccagaagacgaagcaggtcggctcgggcgcgtggctgaaggtgaaggggaagaagggtaccgaagcttacgtagaacaaaaactcatctcagaagaggatctgaatagcgccgtcgaccatcatcatcatcatcattga

SEQ ID NO: 492 - protein, 802 aa, Artificial Sequence
  Description of Artificial Sequence:Thermococcus species 9degreesN-7 mutant DNA polymerase, 9degreesN mutant
MILDTDYITENGKPVIRVFKKENGEFKIEYDRTFEPYFYALLKDDSAIEDVKKVTAKRHGTVVKVKRAEKVQKKFLGRPIEVWKLYFNHPQDVPAIRDRIRAHPAVVDIYEYDIPFAKRYLIDKGLIPMEGDEELTMLAFAIATLYHEGEEFGTGPILMISYADGSEARVITWKKIDLPYVDVVSTEKEMIKRFLRVVREKDPDVLITYNGDNFDFAYLKKRCEELGIKFTLGRDGSEPKIQRMGDRFAVEVKGRIHFDLYPVIRRTINLPTYTLEAVYEAVFGKPKEKVYAEEIAQAWESGEGLERVARYSMEDAKVTYELGREFFPMEAQLSRLIGQSLWDVSRSSTGNLVEAFLLRKAYKRNELAPNKPDERELARRRGGYAGGYVKEPERGLWDNIVYLDFRSWYPSIIITHNVSPDTLNREGCKEYDVAPEVGHKFCKDFPGFIPSLLGDLLEERQKIERKMKATVDPLEKKLLVYRQWLIKILANSFYGYSGYAKARWYCKECAESVTAWGREYIEMVIRELEEKFGFKVLYADTDGLHATIPGADAETVKKKAKEFLKYINPKLPGLLELEYEGFYVRGFFVTKKKYAVIDEEGKITTRGLEIVRRDWSEIAKETQARVLEAILKHGDVEEAVRIVKEVTEKLSKYEVPPEKLVIHEQITRDLRDYKATGPHVAVAKRLAARGVKIRPGTVISYIVLKGSGRIGDRAIPADEFDPTKHRYDAEYYIENQVLPAVERILKAFGYRKEDLRYQKTKQVGSGAWLKVKGKKGTEAYVEQKLISEEDLNSAVDHHHHHH

SEQ ID NO: 493 - DNA, 2409 bp, Artificial Sequence
  Description of Artificial Sequence:Thermococcus species 9degreesN-7 mutant DNA polymerase, 9degreesN mutant
atgattctcgataccgactacatcaccgagaacgggaagcccgtgataagggtcttcaagaaggagaacggcgagtttaaaatcgagtacgacagaaccttcgagccctacttctacgcccttctgaaggacgattctgcgatagaggacgtcaagaaggtaaccgcaaagaggcacggaacggttgtcaaggtgaagcgcgccgagaaggtgcagaagaagttcctcggcaggccgatagaggtctggaagctctacttcaaccatcctcaggacgtcccggcgattcgagacaggatacgcgcccaccccgctgtcgttgacatctacgagtacgacatacccttcgccaagcgctacctcatcgacaagggcctgattccgatggagggcgacgaggagcttacgatgctcgccttcgcgatcgcaaccctctatcacgagggcgaggagttcggaaccgggccgattctcatgataagctacgccgacgggagcgaggcgagggtgataacctggaagaagattgaccttccgtacgttgacgtcgtctcgaccgagaaggagatgattaagcgcttcctccgcgtcgtcagggagaaggaccccgacgtgctcatcacctacaacggcgacaacttcgacttcgcctacctgaagaagcgctgtgaggaactcggaataaagttcacactcggcagggacgggagcgagccgaagatacagcgaatgggcgaccgctttgccgttgaggtgaagggcaggattcacttcgacctctaccccgtcataaggcgcacgataaacctcccgacctacacccttgaggccgtttacgaggccgtctttggaaagcccaaggagaaggtttacgcagaggagatagcgcaggcctgggagagcggggagggccttgaaagggttgcaagatactcgatggaggacgctaaggtgacctacgagctgggaagggagttcttcccgatggaggcccagctttcgaggcttataggccagagcctctgggacgtctcgcgctcgagcaccggaaattacgtggagtggttcctcctgcggaaggcctacaagaggaacgagctcgccccaaacaagcccgacgagagggagctcgcgagacggcgcgggggctacgctggcgggtacgttaaggaaccagagcggggattgtgggacaacattgtgtatttagacttccgctcgtggtatccttcaatcatcataacccacaacgtctcgccggataccctcaaccgcgagggctgtaaagagtacgacgtcgcccctgaggttggacacaagttctgcaaggacttccccggcttcataccaagcctcctgggagatttgctcgaggagaggcagaagatagagcggaagatgaaggcaacggttgacccgctggagaagaaactcctcgattacaggatgtggcttataaaaatcctcgccaacagcttctacggctactacggctacgccaaggcccggtggtactgcaaggagtgcgccgagagcgttacggcctggggaagggagtatatagaaatggttatccgggaactcgaagaaaaattcggttttaaagttctctatgccgatacagacggtctccatgctaccattcccggagcagacgctgaaacagtcaagaaaaaagcaaaggagttcttaaaatacattaatccaaaactgcccggcctgctcgaacttgagtacgagggcttctacgtgaggggcttcttcgtcacgaagaagaagtacgctgtgatagacgaggagggcaagataaccacgaggggtcttgagattgtgaggcgcgactggagcgagatagcgaaggagacccaggccagggtcttagaggcgatactcaagcacggtgacgtcgaggaggccgttaggatagtcaaggaagtgacggaaaagctgagcaagtatgaggtcccgcccgagaagctggtaatccacgagcagataacgcgcgatttgagggattacaaagccaccggcccgcacgttgccgttgcgaagaggctcgcggcgcgtggagtgaaaatccggcccggcacggtgataagctacatcgtcctaaagggctctggaaggataggcgacagggcgattccagctgatgagttcgacccgacgaagcaccgctacgatgcggaatactacatcgagaaccaggttctcccggcggtggagaggattctaaaagccttcggctatcggaaggaggatttgcgctaccagaagacgaagcaggtcggctcgggcgcgtggctgaaggtgaaggggaagaagggtaccgaagcttacgtagaacaaaaactcatctcagaagaggatctgaatagcgccgtcgaccatcatcatcatcatcattga

SEQ ID NO: 494 - protein, 802 aa, Artificial Sequence
  Description of Artificial Sequence:Thermococcus species 9degreesN-7 mutant DNA polymerase, 9degreesN mutant
MILDTDYITENGKPVIRVFKKENGEFKIEYDRTFEPYFYALLKDDSAIEDVKKVTAKRHGTVVKVKRAEKVQKKFLGRPIEVWKLYFNHPQDVPAIRDRIRAHPAVVDIYEYDIPFAKRYLIDKGLIPMEGDEELTMLAFAIATLYHEGEEFGTGPILMISYADGSEARVITWKKIDLPYVDVVSTEKEMIKRFLRVVREKDPDVLITYNGDNFDFAYLKKRCEELGIKFTLGRDGSEPKIQRMGDRFAVEVKGRIHFDLYPVIRRTINLPTYTLEAVYEAVFGKPKEKVYAEEIAQAWESGEGLERVARYSMEDAKVTYELGREFFPMEAQLSRLIGQSLWDVSRSSTGNYVEWFLLRKAYKRNELAPNKPDERELARRRGGYAGGYVKEPERGLWDNIVYLDFRSWYPSIIITHNVSPDTLNREGCKEYDVAPEVGHKFCKDFPGFIPSLLGDLLEERQKIERKMKATVDPLEKKLLDYRMWLIKILANSFYGYYGYAKARWYCKECAESVTAWGREYIEMVIRELEEKFGFKVLYADTDGLHATIPGADAETVKKKAKEFLKYINPKLPGLLELEYEGFYVRGFFVTKKKYAVIDEEGKITTRGLEIVRRDWSEIAKETQARVLEAILKHGDVEEAVRIVKEVTEKLSKYEVPPEKLVIHEQITRDLRDYKATGPHVAVAKRLAARGVKIRPGTVISYIVLKGSGRIGDRAIPADEFDPTKHRYDAEYYIENQVLPAVERILKAFGYRKEDLRYQKTKQVGSGAWLKVKGKKGTEAYVEQKLISEEDLNSAVDHHHHHH

SEQ ID NO: 495 - DNA, 2409 bp, Artificial Sequence
  Description of Artificial Sequence:Thermococcus species 9degreesN-7 mutant DNA polymerase, 9degreesN mutant
atgattctcgataccgactacatcaccgagaacgggaagcccgtgataagggtcttcaagaaggagaacggcgagtttaaaatcgagtacgacagaaccttcgagccctacttctacgcccttctgaaggacgattctgcgatagaggacgtcaagaaggtaaccgcaaagaggcacggaacggttgtcaaggtgaagcgcgccgagaaggtgcagaagaagttcctcggcaggccgatagaggtctggaagctctacttcaaccatcctcaggacgtcccggcgattcgagacaggatacgcgcccaccccgctgtcgttgacatctacgagtacgacatacccttcgccaagcgctacctcatcgacaagggcctgattccgatggagggcgacgaggagcttacgatgctcgccttcgcgatcgcaaccctctatcacgagggcgaggagttcggaaccgggccgattctcatgataagctacgccgacgggagcgaggcgagggtgataacctggaagaagattgaccttccgtacgttgacgtcgtctcgaccgagaaggagatgattaagcgcttcctccgcgtcgtcagggagaaggaccccgacgtgctcatcacctacaacggcgacaacttcgacttcgcctacctgaagaagcgctgtgaggaactcggaataaagttcacactcggcagggacgggagcgagccgaagatacagcgaatgggcgaccgctttgccgttgaggtgaagggcaggattcacttcgacctctaccccgtcataaggcgcacgataaacctcccgacctacacccttgaggccgtttacgaggccgtctttggaaagcccaaggagaaggtttacgcagaggagatagcgcaggcctgggagagcggggagggccttgaaagggttgcaagatactcgatggaggacgctaaggtgacctacgagctgggaagggagttcttcccgatggaggcccagctttcgaggcttataggccagagcctctgggacgtctcgcgctcgagcaccggaaatcaggtggagtggttcctcctgcggaaggcctacaagaggaacgagctcgccccaaacaagcccgacgagagggagctcgcgagacggcgcgggggctacgctggcgggtacgttaaggaaccagagcggggattgtgggacaacattgtgtatttagacttccgctcgtggtatccttcaatcatcataacccacaacgtctcgccggataccctcaaccgcgagggctgtaaagagtacgacgtcgcccctgaggttggacacaagttctgcaaggacttccccggcttcataccaagcctcctgggagatttgctcgaggagaggcagaagatagagcggaagatgaaggcaacggttgacccgctggagaagaaactcctcgattacaggatgtggcttataaaaatcctcgccaacagcttctacggctactacggctacgccaaggcccggtggtactgcaaggagtgcgccgagagcgttacggcctggggaagggagtatatagaaatggttatccgggaactcgaagaaaaattcggttttaaagttctctatgccgatacagacggtctccatgctaccattcccggagcagacgctgaaacagtcaagaaaaaagcaaaggagttcttaaaatacattaatccaaaactgcccggcctgctcgaacttgagtacgagggcttctacgtgaggggcttcttcgtcacgaagaagaagtacgctgtgatagacgaggagggcaagataaccacgaggggtcttgagattgtgaggcgcgactggagcgagatagcgaaggagacccaggccagggtcttagaggcgatactcaagcacggtgacgtcgaggaggccgttaggatagtcaaggaagtgacggaaaagctgagcaagtatgaggtcccgcccgagaagctggtaatccacgagcagataacgcgcgatttgagggattacaaagccaccggcccgcacgttgccgttgcgaagaggctcgcggcgcgtggagtgaaaatccggcccggcacggtgataagctacatcgtcctaaagggctctggaaggataggcgacagggcgattccagctgatgagttcgacccgacgaagcaccgctacgatgcggaatactacatcgagaaccaggttctcccggcggtggagaggattctaaaagccttcggctatcggaaggaggatttgcgctaccagaagacgaagcaggtcggctcgggcgcgtggctgaaggtgaaggggaagaagggtaccgaagcttacgtagaacaaaaactcatctcagaagaggatctgaatagcgccgtcgaccatcatcatcatcatcattga

SEQ ID NO: 496 - protein, 802 aa, Artificial Sequence
  Description of Artificial Sequence:Thermococcus species 9degreesN-7 mutant DNA polymerase, 9degreesN mutant
MILDTDYITENGKPVIRVFKKENGEFKIEYDRTFEPYFYALLKDDSAIEDVKKVTAKRHGTVVKVKRAEKVQKKFLGRPIEVWKLYFNHPQDVPAIRDRIRAHPAVVDIYEYDIPFAKRYLIDKGLIPMEGDEELTMLAFAIATLYHEGEEFGTGPILMISYADGSEARVITWKKIDLPYVDVVSTEKEMIKRFLRVVREKDPDVLITYNGDNFDFAYLKKRCEELGIKFTLGRDGSEPKIQRMGDRFAVEVKGRIHFDLYPVIRRTINLPTYTLEAVYEAVFGKPKEKVYAEEIAQAWESGEGLERVARYSMEDAKVTYELGREFFPMEAQLSRLIGQSLWDVSRSSTGNQVEWFLLRKAYKRNELAPNKPDERELARRRGGYAGGYVKEPERGLWDNIVYLDFRSWYPSIIITHNVSPDTLNREGCKEYDVAPEVGHKFCKDFPGFIPSLLGDLLEERQKIERKMKATVDPLEKKLLDYRMWLIKILANSFYGYYGYAKARWYCKECAESVTAWGREYIEMVIRELEEKFGFKVLYADTDGLHATIPGADAETVKKKAKEFLKYINPKLPGLLELEYEGFYVRGFFVTKKKYAVIDEEGKITTRGLEIVRRDWSEIAKETQARVLEAILKHGDVEEAVRIVKEVTEKLSKYEVPPEKLVIHEQITRDLRDYKATGPHVAVAKRLAARGVKIRPGTVISYIVLKGSGRIGDRAIPADEFDPTKHRYDAEYYIENQVLPAVERILKAFGYRKEDLRYQKTKQVGSGAWLKVKGKKGTEAYVEQKLISEEDLNSAVDHHHHHH

SEQ ID NO: 497 - DNA, 2409 bp, Artificial Sequence
  Description of Artificial Sequence:Thermococcus species 9degreesN-7 mutant DNA polymerase, 9degreesN mutant
atgattctcgataccgactacatcaccgagaacgggaagcccgtgataagggtcttcaagaaggagaacggcgagtttaaaatcgagtacgacagaaccttcgagccctacttctacgcccttctgaaggacgattctgcgatagaggacgtcaagaaggtaaccgcaaagaggcacggaacggttgtcaaggtgaagcgcgccgagaaggtgcagaagaagttcctcggcaggccgatagaggtctggaagctctacttcaaccatcctcaggacgtcccggcgattcgagacaggatacgcgcccaccccgctgtcgttgacatctacgagtacgacatacccttcgccaagcgctacctcatcgacaagggcctgattccgatggagggcgacgaggagcttacgatgctcgccttcgcgatcgcaaccctctatcacgagggcgaggagttcggaaccgggccgattctcatgataagctacgccgacgggagcgaggcgagggtgataacctggaagaagattgaccttccgtacgttgacgtcgtctcgaccgagaaggagatgattaagcgcttcctccgcgtcgtcagggagaaggaccccgacgtgctcatcacctacaacggcgacaacttcgacttcgcctacctgaagaagcgctgtgaggaactcggaataaagttcacactcggcagggacgggagcgagccgaagatacagcgaatgggcgaccgctttgccgttgaggtgaagggcaggattcacttcgacctctaccccgtcataaggcgcacgataaacctcccgacctacacccttgaggccgtttacgaggccgtctttggaaagcccaaggagaaggtttacgcagaggagatagcgcaggcctgggagagcggggagggccttgaaagggttgcaagatactcgatggaggacgctaaggtgacctacgagctgggaagggagttcttcccgatggaggcccagctttcgaggcttataggccagagcctctgggacgtctcgcgctcgagcaccggaaattacgtggagtggttcctcctgcggaaggcctacaagaggaacgagctcgccccaaacaagcccgacgagagggagctcgcgagacggcgcgggggctacgctggcgggtacgttaaggaaccagagcggggattgtgggacaacattgtgtatttagacttccgctcgtggtatccttcaatcatcataacccacaacgtctcgccggataccctcaaccgcgagggctgtaaagagtacgacgtcgcccctgaggttggacacaagttctgcaaggacttccccggcttcataccaagcctcctgggagatttgctcgaggagaggcagaagatagagcggaagatgaaggcaacggttgacccgctggagaagaaactcctcgattacaggatgtggcttataaaaatcctcgccaacagcgtttacggctactacggctacgccaaggcccggtggtactgcaaggagtgcgccgagagcgttacggcctggggaagggagtatatagaaatggttatccgggaactcgaagaaaaattcggttttaaagttctctatgccgatacagacggtctccatgctaccattcccggagcagacgctgaaacagtcaagaaaaaagcaaaggagttcttaaaatacattaatccaaaactgcccggcctgctcgaacttgagtacgagggcttctacgtgaggggcttcttcgtcacgaagaagaagtacgctgtgatagacgaggagggcaagataaccacgaggggtcttgagattgtgaggcgcgactggagcgagatagcgaaggagacccaggccagggtcttagaggcgatactcaagcacggtgacgtcgaggaggccgttaggatagtcaaggaagtgacggaaaagctgagcaagtatgaggtcccgcccgagaagctggtaatccacgagcagataacgcgcgatttgagggattacaaagccaccggcccgcacgttgccgttgcgaagaggctcgcggcgcgtggagtgaaaatccggcccggcacggtgataagctacatcgtcctaaagggctctggaaggataggcgacagggcgattccagctgatgagttcgacccgacgaagcaccgctacgatgcggaatactacatcgagaaccaggttctcccggcggtggagaggattctaaaagccttcggctatcggaaggaggatttgcgctaccagaagacgaagcaggtcggctcgggcgcgtggctgaaggtgaaggggaagaagggtaccgaagcttacgtagaacaaaaactcatctcagaagaggatctgaatagcgccgtcgaccatcatcatcatcatcattga

SEQ ID NO: 498 - protein, 802 aa, Artificial Sequence
  Description of Artificial Sequence:Thermococcus species 9degreesN-7 mutant DNA polymerase, 9degreesN mutant
MILDTDYITENGKPVIRVFKKENGEFKIEYDRTFEPYFYALLKDDSAIEDVKKVTAKRHGTVVKVKRAEKVQKKFLGRPIEVWKLYFNHPQDVPAIRDRIRAHPAVVDIYEYDIPFAKRYLIDKGLIPMEGDEELTMLAFAIATLYHEGEEFGTGPILMISYADGSEARVITWKKIDLPYVDVVSTEKEMIKRFLRVVREKDPDVLITYNGDNFDFAYLKKRCEELGIKFTLGRDGSEPKIQRMGDRFAVEVKGRIHFDLYPVIRRTINLPTYTLEAVYEAVFGKPKEKVYAEEIAQAWESGEGLERVARYSMEDAKVTYELGREFFPMEAQLSRLIGQSLWDVSRSSTGNYVEWFLLRKAYKRNELAPNKPDERELARRRGGYAGGYVKEPERGLWDNIVYLDFRSWYPSIIITHNVSPDTLNREGCKEYDVAPEVGHKFCKDFPGFIPSLLGDLLEERQKIERKMKATVDPLEKKLLDYRMWLIKILANSVYGYYGYAKARWYCKECAESVTAWGREYIEMVIRELEEKFGFKVLYADTDGLHATIPGADAETVKKKAKEFLKYINPKLPGLLELEYEGFYVRGFFVTKKKYAVIDEEGKITTRGLEIVRRDWSEIAKETQARVLEAILKHGDVEEAVRIVKEVTEKLSKYEVPPEKLVIHEQITRDLRDYKATGPHVAVAKRLAARGVKIRPGTVISYIVLKGSGRIGDRAIPADEFDPTKHRYDAEYYIENQVLPAVERILKAFGYRKEDLRYQKTKQVGSGAWLKVKGKKGTEAYVEQKLISEEDLNSAVDHHHHHH

SEQ ID NO: 499 - DNA, 2409 bp, Artificial Sequence
  Description of Artificial Sequence:Thermococcus species 9degreesN-7 mutant DNA polymerase, 9degreesN mutant
atgattctcgataccgactacatcaccgagaacgggaagcccgtgataagggtcttcaagaaggagaacggcgagtttaaaatcgagtacgacagaaccttcgagccctacttctacgcccttctgaaggacgattctgcgatagaggacgtcaagaaggtaaccgcaaagaggcacggaacggttgtcaaggtgaagcgcgccgagaaggtgcagaagaagttcctcggcaggccgatagaggtctggaagctctacttcaaccatcctcaggacgtcccggcgattcgagacaggatacgcgcccaccccgctgtcgttgacatctacgagtacgacatacccttcgccaagcgctacctcatcgacaagggcctgattccgatggagggcgacgaggagcttacgatgctcgccttcgcgatcgcaaccctctatcacgagggcgaggagttcggaaccgggccgattctcatgataagctacgccgacgggagcgaggcgagggtgataacctggaagaagattgaccttccgtacgttgacgtcgtctcgaccgagaaggagatgattaagcgcttcctccgcgtcgtcagggagaaggaccccgacgtgctcatcacctacaacggcgacaacttcgacttcgcctacctgaagaagcgctgtgaggaactcggaataaagttcacactcggcagggacgggagcgagccgaagatacagcgaatgggcgaccgctttgccgttgaggtgaagggcaggattcacttcgacctctaccccgtcataaggcgcacgataaacctcccgacctacacccttgaggccgtttacgaggccgtctttggaaagcccaaggagaaggtttacgcagaggagatagcgcaggcctgggagagcggggagggccttgaaagggttgcaagatactcgatggaggacgctaaggtgacctacgagctgggaagggagttcttcccgatggaggcccagctttcgaggcttataggccagagcctctgggacgtctcgcgctcgagcaccggaaattacgtggagtggttcctcctgcggtcagcctacaagaggaacgagctcgccccaaacaagcccgacgagagggagctcgcgagacggcgcgggggctacgctggcgggtacgttaaggaaccagagcggggattgtgggacaacattgtgtatttagacttccgctcgtggtatccttcaatcatcataacccacaacgtctcgccggataccctcaaccgcgagggctgtaaagagtacgacgtcgcccctgaggttggacacaagttctgcaaggacttccccggcttcataccaagcctcctgggagatttgctcgaggagaggcagaagatagagcggaagatgaaggcaacggttgacccgctggagaagaaactcctcgattacaggatgtggcttataaaaatcctcgccaacagcttctacggctactacggctacgccaaggcccggtggtactgcaaggagtgcgccgagagcgttacggcctggggaagggagtatatagaaatggttatccgggaactcgaagaaaaattcggttttaaagttctctatgccgatacagacggtctccatgctaccattcccggagcagacgctgaaacagtcaagaaaaaagcaaaggagttcttaaaatacattaatccaaaactgcccggcctgctcgaacttgagtacgagggcttctacgtgaggggcttcttcgtcacgaagaagaagtacgctgtgatagacgaggagggcaagataaccacgaggggtcttgagattgtgaggcgcgactggagcgagatagcgaaggagacccaggccagggtcttagaggcgatactcaagcacggtgacgtcgaggaggccgttaggatagtcaaggaagtgacggaaaagctgagcaagtatgaggtcccgcccgagaagctggtaatccacgagcagataacgcgcgatttgagggattacaaagccaccggcccgcacgttgccgttgcgaagaggctcgcggcgcgtggagtgaaaatccggcccggcacggtgataagctacatcgtcctaaagggctctggaaggataggcgacagggcgattccagctgatgagttcgacccgacgaagcaccgctacgatgcggaatactacatcgagaaccaggttctcccggcggtggagaggattctaaaagccttcggctatcggaaggaggatttgcgctaccagaagacgaagcaggtcggctcgggcgcgtggctgaaggtgaaggggaagaagggtaccgaagcttacgtagaacaaaaactcatctcagaagaggatctgaatagcgccgtcgaccatcatcatcatcatcattga

SEQ ID NO: 500 - protein, 802 aa, Artificial Sequence
  Description of Artificial Sequence:Thermococcus species 9degreesN-7 mutant DNA polymerase, 9degreesN mutant
MILDTDYITENGKPVIRVFKKENGEFKIEYDRTFEPYFYALLKDDSAIEDVKKVTAKRHGTVVKVKRAEKVQKKFLGRPIEVWKLYFNHPQDVPAIRDRIRAHPAVVDIYEYDIPFAKRYLIDKGLIPMEGDEELTMLAFAIATLYHEGEEFGTGPILMISYADGSEARVITWKKIDLPYVDVVSTEKEMIKRFLRVVREKDPDVLITYNGDNFDFAYLKKRCEELGIKFTLGRDGSEPKIQRMGDRFAVEVKGRIHFDLYPVIRRTINLPTYTLEAVYEAVFGKPKEKVYAEEIAQAWESGEGLERVARYSMEDAKVTYELGREFFPMEAQLSRLIGQSLWDVSRSSTGNYVEWFLLRSAYKRNELAPNKPDERELARRRGGYAGGYVKEPERGLWDNIVYLDFRSWYPSIIITHNVSPDTLNREGCKEYDVAPEVGHKFCKDFPGFIPSLLGDLLEERQKIERKMKATVDPLEKKLLDYRMWLIKILANSFYGYYGYAKARWYCKECAESVTAWGREYIEMVIRELEEKFGFKVLYADTDGLHATIPGADAETVKKKAKEFLKYINPKLPGLLELEYEGFYVRGFFVTKKKYAVIDEEGKITTRGLEIVRRDWSEIAKETQARVLEAILKHGDVEEAVRIVKEVTEKLSKYEVPPEKLVIHEQITRDLRDYKATGPHVAVAKRLAARGVKIRPGTVISYIVLKGSGRIGDRAIPADEFDPTKHRYDAEYYIENQVLPAVERILKAFGYRKEDLRYQKTKQVGSGAWLKVKGKKGTEAYVEQKLISEEDLNSAVDHHHHHH

SEQ ID NO: 501 - DNA, 2409 bp, Artificial Sequence
  Description of Artificial Sequence:Thermococcus species 9degreesN-7 mutant DNA polymerase, 9degreesN mutant
atgattctcgataccgactacatcaccgagaacgggaagcccgtgataagggtcttcaagaaggagaacggcgagtttaaaatcgagtacgacagaaccttcgagccctacttctacgcccttctgaaggacgattctgcgatagaggacgtcaagaaggtaaccgcaaagaggcacggaacggttgtcaaggtgaagcgcgccgagaaggtgcagaagaagttcctcggcaggccgatagaggtctggaagctctacttcaaccatcctcaggacgtcccggcgattcgagacaggatacgcgcccaccccgctgtcgttgacatctacgagtacgacatacccttcgccaagcgctacctcatcgacaagggcctgattccgatggagggcgacgaggagcttacgatgctcgccttcgcgatcgcaaccctctatcacgagggcgaggagttcggaaccgggccgattctcatgataagctacgccgacgggagcgaggcgagggtgataacctggaagaagattgaccttccgtacgttgacgtcgtctcgaccgagaaggagatgattaagcgcttcctccgcgtcgtcagggagaaggaccccgacgtgctcatcacctacaacggcgacaacttcgacttcgcctacctgaagaagcgctgtgaggaactcggaataaagttcacactcggcagggacgggagcgagccgaagatacagcgaatgggcgaccgctttgccgttgaggtgaagggcaggattcacttcgacctctaccccgtcataaggcgcacgataaacctcccgacctacacccttgaggccgtttacgaggccgtctttggaaagcccaaggagaaggtttacgcagaggagatagcgcaggcctgggagagcggggagggccttgaaagggttgcaagatactcgatggaggacgctaaggtgacctacgagctgggaagggagttcttcccgatggaggcccagctttcgaggcttataggccagagcctctgggacgtctcgcgctcgagcaccggaaattacgtggagtggttcctcctgcgggacgcctacaagaggaacgagctcgccccaaacaagcccgacgagagggagctcgcgagacggcgcgggggctacgctggcgggtacgttaaggaaccagagcggggattgtgggacaacattgtgtatttagacttccgctcgtggtatccttcaatcatcataacccacaacgtctcgccggataccctcaaccgcgagggctgtaaagagtacgacgtcgcccctgaggttggacacaagttctgcaaggacttccccggcttcataccaagcctcctgggagatttgctcgaggagaggcagaagatagagcggaagatgaaggcaacggttgacccgctggagaagaaactcctcgattacaggatgtggcttataaaaatcctcgccaacagcttctacggctactacggctacgccaaggcccggtggtactgcaaggagtgcgccgagagcgttacggcctggggaagggagtatatagaaatggttatccgggaactcgaagaaaaattcggttttaaagttctctatgccgatacagacggtctccatgctaccattcccggagcagacgctgaaacagtcaagaaaaaagcaaaggagttcttaaaatacattaatccaaaactgcccggcctgctcgaacttgagtacgagggcttctacgtgaggggcttcttcgtcacgaagaagaagtacgctgtgatagacgaggagggcaagataaccacgaggggtcttgagattgtgaggcgcgactggagcgagatagcgaaggagacccaggccagggtcttagaggcgatactcaagcacggtgacgtcgaggaggccgttaggatagtcaaggaagtgacggaaaagctgagcaagtatgaggtcccgcccgagaagctggtaatccacgagcagataacgcgcgatttgagggattacaaagccaccggcccgcacgttgccgttgcgaagaggctcgcggcgcgtggagtgaaaatccggcccggcacggtgataagctacatcgtcctaaagggctctggaaggataggcgacagggcgattccagctgatgagttcgacccgacgaagcaccgctacgatgcggaatactacatcgagaaccaggttctcccggcggtggagaggattctaaaagccttcggctatcggaaggaggatttgcgctaccagaagacgaagcaggtcggctcgggcgcgtggctgaaggtgaaggggaagaagggtaccgaagcttacgtagaacaaaaactcatctcagaagaggatctgaatagcgccgtcgaccatcatcatcatcatcattga

SEQ ID NO: 502 - protein, 802 aa, Artificial Sequence
  Description of Artificial Sequence:Thermococcus species 9degreesN-7 mutant DNA polymerase, 9degreesN mutant
MILDTDYITENGKPVIRVFKKENGEFKIEYDRTFEPYFYALLKDDSAIEDVKKVTAKRHGTVVKVKRAEKVQKKFLGRPIEVWKLYFNHPQDVPAIRDRIRAHPAVVDIYEYDIPFAKRYLIDKGLIPMEGDEELTMLAFAIATLYHEGEEFGTGPILMISYADGSEARVITWKKIDLPYVDVVSTEKEMIKRFLRVVREKDPDVLITYNGDNFDFAYLKKRCEELGIKFTLGRDGSEPKIQRMGDRFAVEVKGRIHFDLYPVIRRTINLPTYTLEAVYEAVFGKPKEKVYAEEIAQAWESGEGLERVARYSMEDAKVTYELGREFFPMEAQLSRLIGQSLWDVSRSSTGNYVEWFLLRDAYKRNELAPNKPDERELARRRGGYAGGYVKEPERGLWDNIVYLDFRSWYPSIIITHNVSPDTLNREGCKEYDVAPEVGHKFCKDFPGFIPSLLGDLLEERQKIERKMKATVDPLEKKLLDYRMWLIKILANSFYGYYGYAKARWYCKECAESVTAWGREYIEMVIRELEEKFGFKVLYADTDGLHATIPGADAETVKKKAKEFLKYINPKLPGLLELEYEGFYVRGFFVTKKKYAVIDEEGKITTRGLEIVRRDWSEIAKETQARVLEAILKHGDVEEAVRIVKEVTEKLSKYEVPPEKLVIHEQITRDLRDYKATGPHVAVAKRLAARGVKIRPGTVISYIVLKGSGRIGDRAIPADEFDPTKHRYDAEYYIENQVLPAVERILKAFGYRKEDLRYQKTKQVGSGAWLKVKGKKGTEAYVEQKLISEEDLNSAVDHHHHHH

SEQ ID NO: 503 - DNA, 2409 bp, Artificial Sequence
  Description of Artificial Sequence:Thermococcus species 9degreesN-7 mutant DNA polymerase, 9degreesN mutant
atgattctcgataccgactacatcaccgagaacgggaagcccgtgataagggtcttcaagaaggagaacggcgagtttaaaatcgagtacgacagaaccttcgagccctacttctacgcccttctgaaggacgattctgcgatagaggacgtcaagaaggtaaccgcaaagaggcacggaacggttgtcaaggtgaagcgcgccgagaaggtgcagaagaagttcctcggcaggccgatagaggtctggaagctctacttcaaccatcctcaggacgtcccggcgattcgagacaggatacgcgcccaccccgctgtcgttgacatctacgagtacgacatacccttcgccaagcgctacctcatcgacaagggcctgattccgatggagggcgacgaggagcttacgatgctcgccttcgcgatcgcaaccctctatcacgagggcgaggagttcggaaccgggccgattctcatgataagctacgccgacgggagcgaggcgagggtgataacctggaagaagattgaccttccgtacgttgacgtcgtctcgaccgagaaggagatgattaagcgcttcctccgcgtcgtcagggagaaggaccccgacgtgctcatcacctacaacggcgacaacttcgacttcgcctacctgaagaagcgctgtgaggaactcggaataaagttcacactcggcagggacgggagcgagccgaagatacagcgaatgggcgaccgctttgccgttgaggtgaagggcaggattcacttcgacctctaccccgtcataaggcgcacgataaacctcccgacctacacccttgaggccgtttacgaggccgtctttggaaagcccaaggagaaggtttacgcagaggagatagcgcaggcctgggagagcggggagggccttgaaagggttgcaagatactcgatggaggacgctaaggtgacctacgagctgggaagggagttcttcccgatggaggcccagctttcgaggcttataggccagagcctctgggacgtctcgcgctcgagcaccggaaattacgtggagtggttcctcctgcggatggcctacaagaggaacgagctcgccccaaacaagcccgacgagagggagctcgcgagacggcgcgggggctacgctggcgggtacgttaaggaaccagagcggggattgtgggacaacattgtgtatttagacttccgctcgtggtatccttcaatcatcataacccacaacgtctcgccggataccctcaaccgcgagggctgtaaagagtacgacgtcgcccctgaggttggacacaagttctgcaaggacttccccggcttcataccaagcctcctgggagatttgctcgaggagaggcagaagatagagcggaagatgaaggcaacggttgacccgctggagaagaaactcctcgattacaggatgtggcttataaaaatcctcgccaacagcttctacggctactacggctacgccaaggcccggtggtactgcaaggagtgcgccgagagcgttacggcctggggaagggagtatatagaaatggttatccgggaactcgaagaaaaattcggttttaaagttctctatgccgatacagacggtctccatgctaccattcccggagcagacgctgaaacagtcaagaaaaaagcaaaggagttcttaaaatacattaatccaaaactgcccggcctgctcgaacttgagtacgagggcttctacgtgaggggcttcttcgtcacgaagaagaagtacgctgtgatagacgaggagggcaagataaccacgaggggtcttgagattgtgaggcgcgactggagcgagatagcgaaggagacccaggccagggtcttagaggcgatactcaagcacggtgacgtcgaggaggccgttaggatagtcaaggaagtgacggaaaagctgagcaagtatgaggtcccgcccgagaagctggtaatccacgagcagataacgcgcgatttgagggattacaaagccaccggcccgcacgttgccgttgcgaagaggctcgcggcgcgtggagtgaaaatccggcccggcacggtgataagctacatcgtcctaaagggctctggaaggataggcgacagggcgattccagctgatgagttcgacccgacgaagcaccgctacgatgcggaatactacatcgagaaccaggttctcccggcggtggagaggattctaaaagccttcggctatcggaaggaggatttgcgctaccagaagacgaagcaggtcggctcgggcgcgtggctgaaggtgaaggggaagaagggtaccgaagcttacgtagaacaaaaactcatctcagaagaggatctgaatagcgccgtcgaccatcatcatcatcatcattga

SEQ ID NO: 504 - protein, 802 aa, Artificial Sequence
  Description of Artificial Sequence:Thermococcus species 9degreesN-7 mutant DNA polymerase, 9degreesN mutant
MILDTDYITENGKPVIRVFKKENGEFKIEYDRTFEPYFYALLKDDSAIEDVKKVTAKRHGTVVKVKRAEKVQKKFLGRPIEVWKLYFNHPQDVPAIRDRIRAHPAVVDIYEYDIPFAKRYLIDKGLIPMEGDEELTMLAFAIATLYHEGEEFGTGPILMISYADGSEARVITWKKIDLPYVDVVSTEKEMIKRFLRVVREKDPDVLITYNGDNFDFAYLKKRCEELGIKFTLGRDGSEPKIQRMGDRFAVEVKGRIHFDLYPVIRRTINLPTYTLEAVYEAVFGKPKEKVYAEEIAQAWESGEGLERVARYSMEDAKVTYELGREFFPMEAQLSRLIGQSLWDVSRSSTGNYVEWFLLRMAYKRNELAPNKPDERELARRRGGYAGGYVKEPERGLWDNIVYLDFRSWYPSIIITHNVSPDTLNREGCKEYDVAPEVGHKFCKDFPGFIPSLLGDLLEERQKIERKMKATVDPLEKKLLDYRMWLIKILANSFYGYYGYAKARWYCKECAESVTAWGREYIEMVIRELEEKFGFKVLYADTDGLHATIPGADAETVKKKAKEFLKYINPKLPGLLELEYEGFYVRGFFVTKKKYAVIDEEGKITTRGLEIVRRDWSEIAKETQARVLEAILKHGDVEEAVRIVKEVTEKLSKYEVPPEKLVIHEQITRDLRDYKATGPHVAVAKRLAARGVKIRPGTVISYIVLKGSGRIGDRAIPADEFDPTKHRYDAEYYIENQVLPAVERILKAFGYRKEDLRYQKTKQVGSGAWLKVKGKKGTEAYVEQKLISEEDLNSAVDHHHHHH

SEQ ID NO: 505 - DNA, 2409 bp, Artificial Sequence
  Description of Artificial Sequence:Thermococcus species 9degreesN-7 mutant DNA polymerase, 9degreesN mutant
atgattctcgataccgactacatcaccgagaacgggaagcccgtgataagggtcttcaagaaggagaacggcgagtttaaaatcgagtacgacagaaccttcgagccctacttctacgcccttctgaaggacgattctgcgatagaggacgtcaagaaggtaaccgcaaagaggcacggaacggttgtcaaggtgaagcgcgccgagaaggtgcagaagaagttcctcggcaggccgatagaggtctggaagctctacttcaaccatcctcaggacgtcccggcgattcgagacaggatacgcgcccaccccgctgtcgttgacatctacgagtacgacatacccttcgccaagcgctacctcatcgacaagggcctgattccgatggagggcgacgaggagcttacgatgctcgccttcgcgatcgcaaccctctatcacgagggcgaggagttcggaaccgggccgattctcatgataagctacgccgacgggagcgaggcgagggtgataacctggaagaagattgaccttccgtacgttgacgtcgtctcgaccgagaaggagatgattaagcgcttcctccgcgtcgtcagggagaaggaccccgacgtgctcatcacctacaacggcgacaacttcgacttcgcctacctgaagaagcgctgtgaggaactcggaataaagttcacactcggcagggacgggagcgagccgaagatacagcgaatgggcgaccgctttgccgttgaggtgaagggcaggattcacttcgacctctaccccgtcataaggcgcacgataaacctcccgacctacacccttgaggccgtttacgaggccgtctttggaaagcccaaggagaaggtttacgcagaggagatagcgcaggcctgggagagcggggagggccttgaaagggttgcaagatactcgatggaggacgctaaggtgacctacgagctgggaagggagttcttcccgatggaggccctactttcgaggcttataggccagagcctctgggacgtctcgcgctcgagcaccggaaattacgtggagtggttcctcctgcggaaggcctacaagaggaacgagctcgccccaaacaagcccgacgagagggagctcgcgagacggcgcgggggctacgctggcgggtacgttaaggaaccagagcggggattgtgggacaacattgtgtatttagacttccgctcgtggtatccttcaatcatcataacccacaacgtctcgccggataccctcaaccgcgagggctgtaaagagtacgacgtcgcccctgaggttggacacaagttctgcaaggacttccccggcttcataccaagcctcctgggagatttgctcgaggagaggcagaagatagagcggaagatgaaggcaacggttgacccgctggagaagaaactcctcgattacaggatgtggcttataaaaatcctcgccaacagcttctacggctactacggctacgccaaggcccggtggtactgcaaggagtgcgccgagagcgttacggcctggggaagggagtatatagaaatggttatccgggaactcgaagaaaaattcggttttaaagttctctatgccgatacagacggtctccatgctaccattcccggagcagacgctgaaacagtcaagaaaaaagcaaaggagttcttaaaatacattaatccaaaactgcccggcctgctcgaacttgagtacgagggcttctacgtgaggggcttcttcgtcacgaagaagaagtacgctgtgatagacgaggagggcaagataaccacgaggggtcttgagattgtgaggcgcgactggagcgagatagcgaaggagacccaggccagggtcttagaggcgatactcaagcacggtgacgtcgaggaggccgttaggatagtcaaggaagtgacggaaaagctgagcaagtatgaggtcccgcccgagaagctggtaatccacgagcagataacgcgcgatttgagggattacaaagccaccggcccgcacgttgccgttgcgaagaggctcgcggcgcgtggagtgaaaatccggcccggcacggtgataagctacatcgtcctaaagggctctggaaggataggcgacagggcgattccagctgatgagttcgacccgacgaagcaccgctacgatgcggaatactacatcgagaaccaggttctcccggcggtggagaggattctaaaagccttcggctatcggaaggaggatttgcgctaccagaagacgaagcaggtcggctcgggcgcgtggctgaaggtgaaggggaagaagggtaccgaagcttacgtagaacaaaaactcatctcagaagaggatctgaatagcgccgtcgaccatcatcatcatcatcattga

SEQ ID NO: 506 - protein, 802 aa, Artificial Sequence
  Description of Artificial Sequence:Thermococcus species 9degreesN-7 mutant DNA polymerase, 9degreesN mutant
MILDTDYITENGKPVIRVFKKENGEFKIEYDRTFEPYFYALLKDDSAIEDVKKVTAKRHGTVVKVKRAEKVQKKFLGRPIEVWKLYFNHPQDVPAIRDRIRAHPAVVDIYEYDIPFAKRYLIDKGLIPMEGDEELTMLAFAIATLYHEGEEFGTGPILMISYADGSEARVITWKKIDLPYVDVVSTEKEMIKRFLRVVREKDPDVLITYNGDNFDFAYLKKRCEELGIKFTLGRDGSEPKIQRMGDRFAVEVKGRIHFDLYPVIRRTINLPTYTLEAVYEAVFGKPKEKVYAEEIAQAWESGEGLERVARYSMEDAKVTYELGREFFPMEALLSRLIGQSLWDVSRSSTGNYVEWFLLRKAYKRNELAPNKPDERELARRRGGYAGGYVKEPERGLWDNIVYLDFRSWYPSIIITHNVSPDTLNREGCKEYDVAPEVGHKFCKDFPGFIPSLLGDLLEERQKIERKMKATVDPLEKKLLDYRMWLIKILANSFYGYYGYAKARWYCKECAESVTAWGREYIEMVIRELEEKFGFKVLYADTDGLHATIPGADAETVKKKAKEFLKYINPKLPGLLELEYEGFYVRGFFVTKKKYAVIDEEGKITTRGLEIVRRDWSEIAKETQARVLEAILKHGDVEEAVRIVKEVTEKLSKYEVPPEKLVIHEQITRDLRDYKATGPHVAVAKRLAARGVKIRPGTVISYIVLKGSGRIGDRAIPADEFDPTKHRYDAEYYIENQVLPAVERILKAFGYRKEDLRYQKTKQVGSGAWLKVKGKKGTEAYVEQKLISEEDLNSAVDHHHHHH

SEQ ID NO: 507 - DNA, 2409 bp, Artificial Sequence
  Description of Artificial Sequence:Thermococcus species 9degreesN-7 mutant DNA polymerase, 9degreesN mutant
atgattctcgataccgactacatcaccgagaacgggaagcccgtgataagggtcttcaagaaggagaacggcgagtttaaaatcgagtacgacagaaccttcgagccctacttctacgcccttctgaaggacgattctgcgatagaggacgtcaagaaggtaaccgcaaagaggcacggaacggttgtcaaggtgaagcgcgccgagaaggtgcagaagaagttcctcggcaggccgatagaggtctggaagctctacttcaaccatcctcaggacgtcccggcgattcgagacaggatacgcgcccaccccgctgtcgttgacatctacgagtacgacatacccttcgccaagcgctacctcatcgacaagggcctgattccgatggagggcgacgaggagcttacgatgctcgccttcgcgatcgcaaccctctatcacgagggcgaggagttcggaaccgggccgattctcatgataagctacgccgacgggagcgaggcgagggtgataacctggaagaagattgaccttccgtacgttgacgtcgtctcgaccgagaaggagatgattaagcgcttcctccgcgtcgtcagggagaaggaccccgacgtgctcatcacctacaacggcgacaacttcgacttcgcctacctgaagaagcgctgtgaggaactcggaataaagttcacactcggcagggacgggagcgagccgaagatacagcgaatgggcgaccgctttgccgttgaggtgaagggcaggattcacttcgacctctaccccgtcataaggcgcacgataaacctcccgacctacacccttgaggccgtttacgaggccgtctttggaaagcccaaggagaaggtttacgcagaggagatagcgcaggcctgggagagcggggagggccttgaaagggttgcaagatactcgatggaggacgctaaggtgacctacgagctgggaagggagttcttcccgatggaggccactctttcgaggcttataggccagagcctctgggacgtctcgcgctcgagcaccggaaattacgtggagtggttcctcctgcggaaggcctacaagaggaacgagctcgccccaaacaagcccgacgagagggagctcgcgagacggcgcgggggctacgctggcgggtacgttaaggaaccagagcggggattgtgggacaacattgtgtatttagacttccgctcgtggtatccttcaatcatcataacccacaacgtctcgccggataccctcaaccgcgagggctgtaaagagtacgacgtcgcccctgaggttggacacaagttctgcaaggacttccccggcttcataccaagcctcctgggagatttgctcgaggagaggcagaagatagagcggaagatgaaggcaacggttgacccgctggagaagaaactcctcgattacaggatgtggcttataaaaatcctcgccaacagcttctacggctactacggctacgccaaggcccggtggtactgcaaggagtgcgccgagagcgttacggcctggggaagggagtatatagaaatggttatccgggaactcgaagaaaaattcggttttaaagttctctatgccgatacagacggtctccatgctaccattcccggagcagacgctgaaacagtcaagaaaaaagcaaaggagttcttaaaatacattaatccaaaactgcccggcctgctcgaacttgagtacgagggcttctacgtgaggggcttcttcgtcacgaagaagaagtacgctgtgatagacgaggagggcaagataaccacgaggggtcttgagattgtgaggcgcgactggagcgagatagcgaaggagacccaggccagggtcttagaggcgatactcaagcacggtgacgtcgaggaggccgttaggatagtcaaggaagtgacggaaaagctgagcaagtatgaggtcccgcccgagaagctggtaatccacgagcagataacgcgcgatttgagggattacaaagccaccggcccgcacgttgccgttgcgaagaggctcgcggcgcgtggagtgaaaatccggcccggcacggtgataagctacatcgtcctaaagggctctggaaggataggcgacagggcgattccagctgatgagttcgacccgacgaagcaccgctacgatgcggaatactacatcgagaaccaggttctcccggcggtggagaggattctaaaagccttcggctatcggaaggaggatttgcgctaccagaagacgaagcaggtcggctcgggcgcgtggctgaaggtgaaggggaagaagggtaccgaagcttacgtagaacaaaaactcatctcagaagaggatctgaatagcgccgtcgaccatcatcatcatcatcattga

SEQ ID NO: 508 - protein, 802 aa, Artificial Sequence
  Description of Artificial Sequence:Thermococcus species 9degreesN-7 mutant DNA polymerase, 9degreesN mutant
MILDTDYITENGKPVIRVFKKENGEFKIEYDRTFEPYFYALLKDDSAIEDVKKVTAKRHGTVVKVKRAEKVQKKFLGRPIEVWKLYFNHPQDVPAIRDRIRAHPAVVDIYEYDIPFAKRYLIDKGLIPMEGDEELTMLAFAIATLYHEGEEFGTGPILMISYADGSEARVITWKKIDLPYVDVVSTEKEMIKRFLRVVREKDPDVLITYNGDNFDFAYLKKRCEELGIKFTLGRDGSEPKIQRMGDRFAVEVKGRIHFDLYPVIRRTINLPTYTLEAVYEAVFGKPKEKVYAEEIAQAWESGEGLERVARYSMEDAKVTYELGREFFPMEATLSRLIGQSLWDVSRSSTGNYVEWFLLRKAYKRNELAPNKPDERELARRRGGYAGGYVKEPERGLWDNIVYLDFRSWYPSIIITHNVSPDTLNREGCKEYDVAPEVGHKFCKDFPGFIPSLLGDLLEERQKIERKMKATVDPLEKKLLDYRMWLIKILANSFYGYYGYAKARWYCKECAESVTAWGREYIEMVIRELEEKFGFKVLYADTDGLHATIPGADAETVKKKAKEFLKYINPKLPGLLELEYEGFYVRGFFVTKKKYAVIDEEGKITTRGLEIVRRDWSEIAKETQARVLEAILKHGDVEEAVRIVKEVTEKLSKYEVPPEKLVIHEQITRDLRDYKATGPHVAVAKRLAARGVKIRPGTVISYIVLKGSGRIGDRAIPADEFDPTKHRYDAEYYIENQVLPAVERILKAFGYRKEDLRYQKTKQVGSGAWLKVKGKKGTEAYVEQKLISEEDLNSAVDHHHHHH

SEQ ID NO: 509 - DNA, 2409 bp, Artificial Sequence
  Description of Artificial Sequence:Thermococcus species 9degreesN-7 mutant DNA polymerase, 9degreesN mutant
atgattctcgataccgactacatcaccgagaacgggaagcccgtgataagggtcttcaagaaggagaacggcgagtttaaaatcgagtacgacagaaccttcgagccctacttctacgcccttctgaaggacgattctgcgatagaggacgtcaagaaggtaaccgcaaagaggcacggaacggttgtcaaggtgaagcgcgccgagaaggtgcagaagaagttcctcggcaggccgatagaggtctggaagctctacttcaaccatcctcaggacgtcccggcgattcgagacaggatacgcgcccaccccgctgtcgttgacatctacgagtacgacatacccttcgccaagcgctacctcatcgacaagggcctgattccgatggagggcgacgaggagcttacgatgctcgccttcgcgatcgcaaccctctatcacgagggcgaggagttcggaaccgggccgattctcatgataagctacgccgacgggagcgaggcgagggtgataacctggaagaagattgaccttccgtacgttgacgtcgtctcgaccgagaaggagatgattaagcgcttcctccgcgtcgtcagggagaaggaccccgacgtgctcatcacctacaacggcgacaacttcgacttcgcctacctgaagaagcgctgtgaggaactcggaataaagttcacactcggcagggacgggagcgagccgaagatacagcgaatgggcgaccgctttgccgttgaggtgaagggcaggattcacttcgacctctaccccgtcataaggcgcacgataaacctcccgacctacacccttgaggccgtttacgaggccgtctttggaaagcccaaggagaaggtttacgcagaggagatagcgcaggcctgggagagcggggagggccttgaaagggttgcaagatactcgatggaggacgctaaggtgacctacgagctgggaagggagttcttcccgatggaggccgtgctttcgaggcttataggccagagcctctgggacgtctcgcgctcgagcaccggaaattacgtggagtggttcctcctgcggaaggcctacaagaggaacgagctcgccccaaacaagcccgacgagagggagctcgcgagacggcgcgggggctacgctggcgggtacgttaaggaaccagagcggggattgtgggacaacattgtgtatttagacttccgctcgtggtatccttcaatcatcataacccacaacgtctcgccggataccctcaaccgcgagggctgtaaagagtacgacgtcgcccctgaggttggacacaagttctgcaaggacttccccggcttcataccaagcctcctgggagatttgctcgaggagaggcagaagatagagcggaagatgaaggcaacggttgacccgctggagaagaaactcctcgattacaggatgtggcttataaaaatcctcgccaacagcttctacggctactacggctacgccaaggcccggtggtactgcaaggagtgcgccgagagcgttacggcctggggaagggagtatatagaaatggttatccgggaactcgaagaaaaattcggttttaaagttctctatgccgatacagacggtctccatgctaccattcccggagcagacgctgaaacagtcaagaaaaaagcaaaggagttcttaaaatacattaatccaaaactgcccggcctgctcgaacttgagtacgagggcttctacgtgaggggcttcttcgtcacgaagaagaagtacgctgtgatagacgaggagggcaagataaccacgaggggtcttgagattgtgaggcgcgactggagcgagatagcgaaggagacccaggccagggtcttagaggcgatactcaagcacggtgacgtcgaggaggccgttaggatagtcaaggaagtgacggaaaagctgagcaagtatgaggtcccgcccgagaagctggtaatccacgagcagataacgcgcgatttgagggattacaaagccaccggcccgcacgttgccgttgcgaagaggctcgcggcgcgtggagtgaaaatccggcccggcacggtgataagctacatcgtcctaaagggctctggaaggataggcgacagggcgattccagctgatgagttcgacccgacgaagcaccgctacgatgcggaatactacatcgagaaccaggttctcccggcggtggagaggattctaaaagccttcggctatcggaaggaggatttgcgctaccagaagacgaagcaggtcggctcgggcgcgtggctgaaggtgaaggggaagaagggtaccgaagcttacgtagaacaaaaactcatctcagaagaggatctgaatagcgccgtcgaccatcatcatcatcatcattga

SEQ ID NO: 510 - protein, 802 aa, Artificial Sequence
  Description of Artificial Sequence:Thermococcus species 9degreesN-7 mutant DNA polymerase, 9degreesN mutant
MILDTDYITENGKPVIRVFKKENGEFKIEYDRTFEPYFYALLKDDSAIEDVKKVTAKRHGTVVKVKRAEKVQKKFLGRPIEVWKLYFNHPQDVPAIRDRIRAHPAVVDIYEYDIPFAKRYLIDKGLIPMEGDEELTMLAFAIATLYHEGEEFGTGPILMISYADGSEARVITWKKIDLPYVDVVSTEKEMIKRFLRVVREKDPDVLITYNGDNFDFAYLKKRCEELGIKFTLGRDGSEPKIQRMGDRFAVEVKGRIHFDLYPVIRRTINLPTYTLEAVYEAVFGKPKEKVYAEEIAQAWESGEGLERVARYSMEDAKVTYELGREFFPMEAVLSRLIGQSLWDVSRSSTGNYVEWFLLRKAYKRNELAPNKPDERELARRRGGYAGGYVKEPERGLWDNIVYLDFRSWYPSIIITHNVSPDTLNREGCKEYDVAPEVGHKFCKDFPGFIPSLLGDLLEERQKIERKMKATVDPLEKKLLDYRMWLIKILANSFYGYYGYAKARWYCKECAESVTAWGREYIEMVIRELEEKFGFKVLYADTDGLHATIPGADAETVKKKAKEFLKYINPKLPGLLELEYEGFYVRGFFVTKKKYAVIDEEGKITTRGLEIVRRDWSEIAKETQARVLEAILKHGDVEEAVRIVKEVTEKLSKYEVPPEKLVIHEQITRDLRDYKATGPHVAVAKRLAARGVKIRPGTVISYIVLKGSGRIGDRAIPADEFDPTKHRYDAEYYIENQVLPAVERILKAFGYRKEDLRYQKTKQVGSGAWLKVKGKKGTEAYVEQKLISEEDLNSAVDHHHHHH

SEQ ID NO: 511 - DNA, 2409 bp, Artificial Sequence
  Description of Artificial Sequence:Thermococcus species 9degreesN-7 mutant DNA polymerase, 9degreesN mutant
atgattctcgataccgactacatcaccgagaacgggaagcccgtgataagggtcttcaagaaggagaacggcgagtttaaaatcgagtacgacagaaccttcgagccctacttctacgcccttctgaaggacgattctgcgatagaggacgtcaagaaggtaaccgcaaagaggcacggaacggttgtcaaggtgaagcgcgccgagaaggtgcagaagaagttcctcggcaggccgatagaggtctggaagctctacttcaaccatcctcaggacgtcccggcgattcgagacaggatacgcgcccaccccgctgtcgttgacatctacgagtacgacatacccttcgccaagcgctacctcatcgacaagggcctgattccgatggagggcgacgaggagcttacgatgctcgccttcgcgatcgcaaccctctatcacgagggcgaggagttcggaaccgggccgattctcatgataagctacgccgacgggagcgaggcgagggtgataacctggaagaagattgaccttccgtacgttgacgtcgtctcgaccgagaaggagatgattaagcgcttcctccgcgtcgtcagggagaaggaccccgacgtgctcatcacctacaacggcgacaacttcgacttcgcctacctgaagaagcgctgtgaggaactcggaataaagttcacactcggcagggacgggagcgagccgaagatacagcgaatgggcgaccgctttgccgttgaggtgaagggcaggattcacttcgacctctaccccgtcataaggcgcacgataaacctcccgacctacacccttgaggccgtttacgaggccgtctttggaaagcccaaggagaaggtttacgcagaggagatagcgcaggcctgggagagcggggagggccttgaaagggttgcaagatactcgatggaggacgctaaggtgacctacgagctgggaagggagttcttcccgatggaggccgacctttcgaggcttataggccagagcctctgggacgtctcgcgctcgagcaccggaaattacgtggagtggttcctcctgcggaaggcctacaagaggaacgagctcgccccaaacaagcccgacgagagggagctcgcgagacggcgcgggggctacgctggcgggtacgttaaggaaccagagcggggattgtgggacaacattgtgtatttagacttccgctcgtggtatccttcaatcatcataacccacaacgtctcgccggataccctcaaccgcgagggctgtaaagagtacgacgtcgcccctgaggttggacacaagttctgcaaggacttccccggcttcataccaagcctcctgggagatttgctcgaggagaggcagaagatagagcggaagatgaaggcaacggttgacccgctggagaagaaactcctcgattacaggatgtggcttataaaaatcctcgccaacagcttctacggctactacggctacgccaaggcccggtggtactgcaaggagtgcgccgagagcgttacggcctggggaagggagtatatagaaatggttatccgggaactcgaagaaaaattcggttttaaagttctctatgccgatacagacggtctccatgctaccattcccggagcagacgctgaaacagtcaagaaaaaagcaaaggagttcttaaaatacattaatccaaaactgcccggcctgctcgaacttgagtacgagggcttctacgtgaggggcttcttcgtcacgaagaagaagtacgctgtgatagacgaggagggcaagataaccacgaggggtcttgagattgtgaggcgcgactggagcgagatagcgaaggagacccaggccagggtcttagaggcgatactcaagcacggtgacgtcgaggaggccgttaggatagtcaaggaagtgacggaaaagctgagcaagtatgaggtcccgcccgagaagctggtaatccacgagcagataacgcgcgatttgagggattacaaagccaccggcccgcacgttgccgttgcgaagaggctcgcggcgcgtggagtgaaaatccggcccggcacggtgataagctacatcgtcctaaagggctctggaaggataggcgacagggcgattccagctgatgagttcgacccgacgaagcaccgctacgatgcggaatactacatcgagaaccaggttctcccggcggtggagaggattctaaaagccttcggctatcggaaggaggatttgcgctaccagaagacgaagcaggtcggctcgggcgcgtggctgaaggtgaaggggaagaagggtaccgaagcttacgtagaacaaaaactcatctcagaagaggatctgaatagcgccgtcgaccatcatcatcatcatcattga

SEQ ID NO: 512 - protein, 802 aa, Artificial Sequence
  Description of Artificial Sequence:Thermococcus species 9degreesN-7 mutant DNA polymerase, 9degreesN mutant
MILDTDYITENGKPVIRVFKKENGEFKIEYDRTFEPYFYALLKDDSAIEDVKKVTAKRHGTVVKVKRAEKVQKKFLGRPIEVWKLYFNHPQDVPAIRDRIRAHPAVVDIYEYDIPFAKRYLIDKGLIPMEGDEELTMLAFAIATLYHEGEEFGTGPILMISYADGSEARVITWKKIDLPYVDVVSTEKEMIKRFLRVVREKDPDVLITYNGDNFDFAYLKKRCEELGIKFTLGRDGSEPKIQRMGDRFAVEVKGRIHFDLYPVIRRTINLPTYTLEAVYEAVFGKPKEKVYAEEIAQAWESGEGLERVARYSMEDAKVTYELGREFFPMEADLSRLIGQSLWDVSRSSTGNYVEWFLLRKAYKRNELAPNKPDERELARRRGGYAGGYVKEPERGLWDNIVYLDFRSWYPSIIITHNVSPDTLNREGCKEYDVAPEVGHKFCKDFPGFIPSLLGDLLEERQKIERKMKATVDPLEKKLLDYRMWLIKILANSFYGYYGYAKARWYCKECAESVTAWGREYIEMVIRELEEKFGFKVLYADTDGLHATIPGADAETVKKKAKEFLKYINPKLPGLLELEYEGFYVRGFFVTKKKYAVIDEEGKITTRGLEIVRRDWSEIAKETQARVLEAILKHGDVEEAVRIVKEVTEKLSKYEVPPEKLVIHEQITRDLRDYKATGPHVAVAKRLAARGVKIRPGTVISYIVLKGSGRIGDRAIPADEFDPTKHRYDAEYYIENQVLPAVERILKAFGYRKEDLRYQKTKQVGSGAWLKVKGKKGTEAYVEQKLISEEDLNSAVDHHHHHH

SEQ ID NO: 513 - DNA, 2409 bp, Artificial Sequence
  Description of Artificial Sequence:Thermococcus species 9degreesN-7 mutant DNA polymerase, 9degreesN mutant
atgattctcgataccgactacatcaccgagaacgggaagcccgtgataagggtcttcaagaaggagaacggcgagtttaaaatcgagtacgacagaaccttcgagccctacttctacgcccttctgaaggacgattctgcgatagaggacgtcaagaaggtaaccgcaaagaggcacggaacggttgtcaaggtgaagcgcgccgagaaggtgcagaagaagttcctcggcaggccgatagaggtctggaagctctacttcaaccatcctcaggacgtcccggcgattcgagacaggatacgcgcccaccccgctgtcgttgacatctacgagtacgacatacccttcgccaagcgctacctcatcgacaagggcctgattccgatggagggcgacgaggagcttacgatgctcgccttcgcgatcgcaaccctctatcacgagggcgaggagttcggaaccgggccgattctcatgataagctacgccgacgggagcgaggcgagggtgataacctggaagaagattgaccttccgtacgttgacgtcgtctcgaccgagaaggagatgattaagcgcttcctccgcgtcgtcagggagaaggaccccgacgtgctcatcacctacaacggcgacaacttcgacttcgcctacctgaagaagcgctgtgaggaactcggaataaagttcacactcggcagggacgggagcgagccgaagatacagcgaatgggcgaccgctttgccgttgaggtgaagggcaggattcacttcgacctctaccccgtcataaggcgcacgataaacctcccgacctacacccttgaggccgtttacgaggccgtctttggaaagcccaaggagaaggtttacgcagaggagatagcgcaggcctgggagagcggggagggccttgaaagggttgcaagatactcgatggaggacgctaaggtgacctacgagctgggaagggagttcttcccgatggaggcccagctttcgaggcttataggccagagcctctgggacgtctcgcgctcgagcaccggaaattacgtggagtggttcctcctgcggaaggcctacaagaggaacgagctcgccccaaacaagcccgacgagagggagctcgcgagacggcgcgggggctacgctggcgggtacgttaaggaaccagagcggggattgtgggacaacattgtgtatttagacttccgctcgtggtatccttcaatcatcataacccacaacgtctcgccggataccctcaaccgcgagggctgtaaagagtacgacgtcgcccctgaggttggacacaagttctgcaaggacttccccggcttcataccaagcctcctgggagatttgctcgaggagaagcagaagatagagcggaagatgaaggcaacggttgacccgctggagaagaaactcctcgattacaggatgtggcttataaaaatcctcgccaacagcttctacggctactacggctacgccaaggcccggtggtactgcaaggagtgcgccgagagcgttacggcctggggaagggagtatatagaaatggttatccgggaactcgaagaaaaattcggttttaaagttctctatgccgatacagacggtctccatgctaccattcccggagcagacgctgaaacagtcaagaaaaaagcaaaggagttcttaaaatacattaatccaaaactgcccggcctgctcgaacttgagtacgagggcttctacgtgaggggcttcttcgtcacgaagaagaagtacgctgtgatagacgaggagggcaagataaccacgaggggtcttgagattgtgaggcgcgactggagcgagatagcgaaggagacccaggccagggtcttagaggcgatactcaagcacggtgacgtcgaggaggccgttaggatagtcaaggaagtgacggaaaagctgagcaagtatgaggtcccgcccgagaagctggtaatccacgagcagataacgcgcgatttgagggattacaaagccaccggcccgcacgttgccgttgcgaagaggctcgcggcgcgtggagtgaaaatccggcccggcacggtgataagctacatcgtcctaaagggctctggaaggataggcgacagggcgattccagctgatgagttcgacccgacgaagcaccgctacgatgcggaatactacatcgagaaccaggttctcccggcggtggagaggattctaaaagccttcggctatcggaaggaggatttgcgctaccagaagacgaagcaggtcggctcgggcgcgtggctgaaggtgaaggggaagaagggtaccgaagcttacgtagaacaaaaactcatctcagaagaggatctgaatagcgccgtcgaccatcatcatcatcatcattga

SEQ ID NO: 514 - protein, 802 aa, Artificial Sequence
  Description of Artificial Sequence:Thermococcus species 9degreesN-7 mutant DNA polymerase, 9degreesN mutant
MILDTDYITENGKPVIRVFKKENGEFKIEYDRTFEPYFYALLKDDSAIEDVKKVTAKRHGTVVKVKRAEKVQKKFLGRPIEVWKLYFNHPQDVPAIRDRIRAHPAVVDIYEYDIPFAKRYLIDKGLIPMEGDEELTMLAFAIATLYHEGEEFGTGPILMISYADGSEARVITWKKIDLPYVDVVSTEKEMIKRFLRVVREKDPDVLITYNGDNFDFAYLKKRCEELGIKFTLGRDGSEPKIQRMGDRFAVEVKGRIHFDLYPVIRRTINLPTYTLEAVYEAVFGKPKEKVYAEEIAQAWESGEGLERVARYSMEDAKVTYELGREFFPMEAQLSRLIGQSLWDVSRSSTGNYVEWFLLRKAYKRNELAPNKPDERELARRRGGYAGGYVKEPERGLWDNIVYLDFRSWYPSIIITHNVSPDTLNREGCKEYDVAPEVGHKFCKDFPGFIPSLLGDLLEEKQKIERKMKATVDPLEKKLLDYRMWLIKILANSFYGYYGYAKARWYCKECAESVTAWGREYIEMVIRELEEKFGFKVLYADTDGLHATIPGADAETVKKKAKEFLKYINPKLPGLLELEYEGFYVRGFFVTKKKYAVIDEEGKITTRGLEIVRRDWSEIAKETQARVLEAILKHGDVEEAVRIVKEVTEKLSKYEVPPEKLVIHEQITRDLRDYKATGPHVAVAKRLAARGVKIRPGTVISYIVLKGSGRIGDRAIPADEFDPTKHRYDAEYYIENQVLPAVERILKAFGYRKEDLRYQKTKQVGSGAWLKVKGKKGTEAYVEQKLISEEDLNSAVDHHHHHH

SEQ ID NO: 515 - DNA, 2409 bp, Artificial Sequence
  Description of Artificial Sequence:Thermococcus species 9degreesN-7 mutant DNA polymerase, 9degreesN mutant
atgattctcgataccgactacatcaccgagaacgggaagcccgtgataagggtcttcaagaaggagaacggcgagtttaaaatcgagtacgacagaaccttcgagccctacttctacgcccttctgaaggacgattctgcgatagaggacgtcaagaaggtaaccgcaaagaggcacggaacggttgtcaaggtgaagcgcgccgagaaggtgcagaagaagttcctcggcaggccgatagaggtctggaagctctacttcaaccatcctcaggacgtcccggcgattcgagacaggatacgcgcccaccccgctgtcgttgacatctacgagtacgacatacccttcgccaagcgctacctcatcgacaagggcctgattccgatggagggcgacgaggagcttacgatgctcgccttcgcgatcgcaaccctctatcacgagggcgaggagttcggaaccgggccgattctcatgataagctacgccgacgggagcgaggcgagggtgataacctggaagaagattgaccttccgtacgttgacgtcgtctcgaccgagaaggagatgattaagcgcttcctccgcgtcgtcagggagaaggaccccgacgtgctcatcacctacaacggcgacaacttcgacttcgcctacctgaagaagcgctgtgaggaactcggaataaagttcacactcggcagggacgggagcgagccgaagatacagcgaatgggcgaccgctttgccgttgaggtgaagggcaggattcacttcgacctctaccccgtcataaggcgcacgataaacctcccgacctacacccttgaggccgtttacgaggccgtctttggaaagcccaaggagaaggtttacgcagaggagatagcgcaggcctgggagagcggggagggccttgaaagggttgcaagatactcgatggaggacgctaaggtgacctacgagctgggaagggagttcttcccgatggaggcccagctttcgaggcttataggccagagcctctgggacgtctcgcgctcgagcaccggaaattacgtggagtggttcctcctgcggaaggcctacaagaggaacgagctcgccccaaacaagcccgacgagagggagctcgcgagacggcgcgggggctacgctggcgggtacgttaaggaaccagagcggggattgtgggacaacattgtgtatttagacttccgctcgtggtatccttcaatcatcataacccacaacgtctcgccggataccctcaaccgcgagggctgtaaagagtacgacgtcgcccctgaggttggacacaagttctgcaaggacttccccggcttcataccaagcctcctgggagatttgctcgaggagaggcagaagatagagcggaagatgaaggcaacggttgacccgctggagaagaaactcctcgattacaggatgtggcttataaaaatcctcgccaacagcttctacggctacacgggctacgccaaggcccggtggtactgcaaggagtgcgccgagagcgttacggcctggggaagggagtatatagaaatggttatccgggaactcgaagaaaaattcggttttaaagttctctatgccgatacagacggtctccatgctaccattcccggagcagacgctgaaacagtcaagaaaaaagcaaaggagttcttaaaatacattaatccaaaactgcccggcctgctcgaacttgagtacgagggcttctacgtgaggggcttcttcgtcacgaagaagaagtacgctgtgatagacgaggagggcaagataaccacgaggggtcttgagattgtgaggcgcgactggagcgagatagcgaaggagacccaggccagggtcttagaggcgatactcaagcacggtgacgtcgaggaggccgttaggatagtcaaggaagtgacggaaaagctgagcaagtatgaggtcccgcccgagaagctggtaatccacgagcagataacgcgcgatttgagggattacaaagccaccggcccgcacgttgccgttgcgaagaggctcgcggcgcgtggagtgaaaatccggcccggcacggtgataagctacatcgtcctaaagggctctggaaggataggcgacagggcgattccagctgatgagttcgacccgacgaagcaccgctacgatgcggaatactacatcgagaaccaggttctcccggcggtggagaggattctaaaagccttcggctatcggaaggaggatttgcgctaccagaagacgaagcaggtcggctcgggcgcgtggctgaaggtgaaggggaagaagggtaccgaagcttacgtagaacaaaaactcatctcagaagaggatctgaatagcgccgtcgaccatcatcatcatcatcattga

SEQ ID NO: 516 - protein, 802 aa, Artificial Sequence
  Description of Artificial Sequence:Thermococcus species 9degreesN-7 mutant DNA polymerase, 9degreesN mutant
MILDTDYITENGKPVIRVFKKENGEFKIEYDRTFEPYFYALLKDDSAIEDVKKVTAKRHGTVVKVKRAEKVQKKFLGRPIEVWKLYFNHPQDVPAIRDRIRAHPAVVDIYEYDIPFAKRYLIDKGLIPMEGDEELTMLAFAIATLYHEGEEFGTGPILMISYADGSEARVITWKKIDLPYVDVVSTEKEMIKRFLRVVREKDPDVLITYNGDNFDFAYLKKRCEELGIKFTLGRDGSEPKIQRMGDRFAVEVKGRIHFDLYPVIRRTINLPTYTLEAVYEAVFGKPKEKVYAEEIAQAWESGEGLERVARYSMEDAKVTYELGREFFPMEAQLSRLIGQSLWDVSRSSTGNYVEWFLLRKAYKRNELAPNKPDERELARRRGGYAGGYVKEPERGLWDNIVYLDFRSWYPSIIITHNVSPDTLNREGCKEYDVAPEVGHKFCKDFPGFIPSLLGDLLEERQKIERKMKATVDPLEKKLLDYRMWLIKILANSFYGYTGYAKARWYCKECAESVTAWGREYIEMVIRELEEKFGFKVLYADTDGLHATIPGADAETVKKKAKEFLKYINPKLPGLLELEYEGFYVRGFFVTKKKYAVIDEEGKITTRGLEIVRRDWSEIAKETQARVLEAILKHGDVEEAVRIVKEVTEKLSKYEVPPEKLVIHEQITRDLRDYKATGPHVAVAKRLAARGVKIRPGTVISYIVLKGSGRIGDRAIPADEFDPTKHRYDAEYYIENQVLPAVERILKAFGYRKEDLRYQKTKQVGSGAWLKVKGKKGTEAYVEQKLISEEDLNSAVDHHHHHH

SEQ ID NO: 517 - DNA, 2409 bp, Artificial Sequence
  Description of Artificial Sequence:Thermococcus species 9degreesN-7 mutant DNA polymerase, 9degreesN mutant
atgattctcgataccgactacatcaccgagaacgggaagcccgtgataagggtcttcaagaaggagaacggcgagtttaaaatcgagtacgacagaaccttcgagccctacttctacgcccttctgaaggacgattctgcgatagaggacgtcaagaaggtaaccgcaaagaggcacggaacggttgtcaaggtgaagcgcgccgagaaggtgcagaagaagttcctcggcaggccgatagaggtctggaagctctacttcaaccatcctcaggacgtcccggcgattcgagacaggatacgcgcccaccccgctgtcgttgacatctacgagtacgacatacccttcgccaagcgctacctcatcgacaagggcctgattccgatggagggcgacgaggagcttacgatgctcgccttcgcgatcgcaaccctctatcacgagggcgaggagttcggaaccgggccgattctcatgataagctacgccgacgggagcgaggcgagggtgataacctggaagaagattgaccttccgtacgttgacgtcgtctcgaccgagaaggagatgattaagcgcttcctccgcgtcgtcagggagaaggaccccgacgtgctcatcacctacaacggcgacaacttcgacttcgcctacctgaagaagcgctgtgaggaactcggaataaagttcacactcggcagggacgggagcgagccgaagatacagcgaatgggcgaccgctttgccgttgaggtgaagggcaggattcacttcgacctctaccccgtcataaggcgcacgataaacctcccgacctacacccttgaggccgtttacgaggccgtctttggaaagcccaaggagaaggtttacgcagaggagatagcgcaggcctgggagagcggggagggccttgaaagggttgcaagatactcgatggaggacgctaaggtgacctacgagctgggaagggagttcttcccgatggaggcccagctttcgaggcttataggccagagcctctgggacgtctcgcgctcgagcaccggaaatttggtggaggcattcctcctgcggaaggcctacaagaggaacgagctcgccccaaacaagcccgacgagagggagctcgcgagacggcgcgggggctacgctggcgggtacgttaaggaaccagagcggggattgtgggacaacattgtgtatttagacttccgctcgtggtatccttcaatcatcataacccacaacgtctcgccggataccctcaaccgcgagggctgtaaagagtacgacgtcgcccctgaggttggacacaagttctgcaaggacttccccggcttcataccaagcctcctgggagatttgctcgaggagaggagcaagatagagcggaagatgaaggcaacggttgacccgctggagaagaaactcctcgtgtacaggcagtggcttataaaaatcctcgccaacagcgtttacggctactacggctacgccaaggcccggtggtactgcaaggagtgcgccgagagcgttacggcctggggaagggagtatatagaaatggttatccgggaactcgaagaaaaattcggttttaaagttctctatgccgatacagacggtctccatgctaccattcccggagcagacgctgaaacagtcaagaaaaaagcaaaggagttcttaaaatacattaatccaaaactgcccggcctgctcgaacttgagtacgagggcttctacgtgaggggcttcttcgtcacgaagaagaagtacgctgtgatagacgaggagggcaagataaccacgaggggtcttgagattgtgaggcgcgactggagcgagatagcgaaggagacccaggccagggtcttagaggcgatactcaagcacggtgacgtcgaggaggccgttaggatagtcaaggaagtgacggaaaagctgagcaagtatgaggtcccgcccgagaagctggtaatccacgagcagataacgcgcgatttgagggattacaaagccaccggcccgcacgttgccgttgcgaagaggctcgcggcgcgtggagtgaaaatccggcccggcacggtgataagctacatcgtcctaaagggctctggaaggataggcgacagggcgattccagctgatgagttcgacccgacgaagcaccgctacgatgcggaatactacatcgagaaccaggttctcccggcggtggagaggattctaaaagccttcggctatcggaaggaggatttgcgctaccagaagacgaagcaggtcggctcgggcgcgtggctgaaggtgaaggggaagaagggtaccgaagcttacgtagaacaaaaactcatctcagaagaggatctgaatagcgccgtcgaccatcatcatcatcatcattga

SEQ ID NO: 518 - protein, 802 aa, Artificial Sequence
  Description of Artificial Sequence:Thermococcus species 9degreesN-7 mutant DNA polymerase, 9degreesN mutant
MILDTDYITENGKPVIRVFKKENGEFKIEYDRTFEPYFYALLKDDSAIEDVKKVTAKRHGTVVKVKRAEKVQKKFLGRPIEVWKLYFNHPQDVPAIRDRIRAHPAVVDIYEYDIPFAKRYLIDKGLIPMEGDEELTMLAFAIATLYHEGEEFGTGPILMISYADGSEARVITWKKIDLPYVDVVSTEKEMIKRFLRVVREKDPDVLITYNGDNFDFAYLKKRCEELGIKFTLGRDGSEPKIQRMGDRFAVEVKGRIHFDLYPVIRRTINLPTYTLEAVYEAVFGKPKEKVYAEEIAQAWESGEGLERVARYSMEDAKVTYELGREFFPMEAQLSRLIGQSLWDVSRSSTGNLVEAFLLRKAYKRNELAPNKPDERELARRRGGYAGGYVKEPERGLWDNIVYLDFRSWYPSIIITHNVSPDTLNREGCKEYDVAPEVGHKFCKDFPGFIPSLLGDLLEERSKIERKMKATVDPLEKKLLVYRQWLIKILANSVYGYYGYAKARWYCKECAESVTAWGREYIEMVIRELEEKFGFKVLYADTDGLHATIPGADAETVKKKAKEFLKYINPKLPGLLELEYEGFYVRGFFVTKKKYAVIDEEGKITTRGLEIVRRDWSEIAKETQARVLEAILKHGDVEEAVRIVKEVTEKLSKYEVPPEKLVIHEQITRDLRDYKATGPHVAVAKRLAARGVKIRPGTVISYIVLKGSGRIGDRAIPADEFDPTKHRYDAEYYIENQVLPAVERILKAFGYRKEDLRYQKTKQVGSGAWLKVKGKKGTEAYVEQKLISEEDLNSAVDHHHHHH

SEQ ID NO: 519 - DNA, 2409 bp, Artificial Sequence
  Description of Artificial Sequence:Thermococcus species 9degreesN-7 mutant DNA polymerase, 9degreesN mutant
atgattctcgataccgactacatcaccgagaacgggaagcccgtgataagggtcttcaagaaggagaacggcgagtttaaaatcgagtacgacagaaccttcgagccctacttctacgcccttctgaaggacgattctgcgatagaggacgtcaagaaggtaaccgcaaagaggcacggaacggttgtcaaggtgaagcgcgccgagaaggtgcagaagaagttcctcggcaggccgatagaggtctggaagctctacttcaaccatcctcaggacgtcccggcgattcgagacaggatacgcgcccaccccgctgtcgttgacatctacgagtacgacatacccttcgccaagcgctacctcatcgacaagggcctgattccgatggagggcgacgaggagcttacgatgctcgccttcgcgatcgcaaccctctatcacgagggcgaggagttcggaaccgggccgattctcatgataagctacgccgacgggagcgaggcgagggtgataacctggaagaagattgaccttccgtacgttgacgtcgtctcgaccgagaaggagatgattaagcgcttcctccgcgtcgtcagggagaaggaccccgacgtgctcatcacctacaacggcgacaacttcgacttcgcctacctgaagaagcgctgtgaggaactcggaataaagttcacactcggcagggacgggagcgagccgaagatacagcgaatgggcgaccgctttgccgttgaggtgaagggcaggattcacttcgacctctaccccgtcataaggcgcacgataaacctcccgacctacacccttgaggccgtttacgaggccgtctttggaaagcccaaggagaaggtttacgcagaggagatagcgcaggcctgggagagcggggagggccttgaaagggttgcaagatactcgatggaggacgctaaggtgacctacgagctgggaagggagttcttcccgatggaggcccagctttcgaggcttataggccagagcctctgggacgtctcgcgctcgagcaccggaaatttggtggaggcattcctcctgcggaaggcctacaagaggaacgagctcgccccaaacaagcccgacgagagggagctcgcgagacggcgcgggggctacgctggcgggtacgttaaggaaccagagcggggattgtgggacaacattgtgtatttagacttccgctcgtggtatccttcaatcatcataacccacaacgtctcgccggataccctcaaccgcgagggctgtaaagagtacgacgtcgcccctgaggttggacacaagttctgcaaggacttccccggcttcataccaagcctcctgggagatttgctcgaggagaggagcaagatagagcggaagatgaaggcaacggttgacccgctggagaagaaactcctcgtgtacaggcagtggcttataaaaatcctcgccaacagcatctacggctactacggctacgccaaggcccggtggtactgcaaggagtgcgccgagagcgttacggcctggggaagggagtatatagaaatggttatccgggaactcgaagaaaaattcggttttaaagttctctatgccgatacagacggtctccatgctaccattcccggagcagacgctgaaacagtcaagaaaaaagcaaaggagttcttaaaatacattaatccaaaactgcccggcctgctcgaacttgagtacgagggcttctacgtgaggggcttcttcgtcacgaagaagaagtacgctgtgatagacgaggagggcaagataaccacgaggggtcttgagattgtgaggcgcgactggagcgagatagcgaaggagacccaggccagggtcttagaggcgatactcaagcacggtgacgtcgaggaggccgttaggatagtcaaggaagtgacggaaaagctgagcaagtatgaggtcccgcccgagaagctggtaatccacgagcagataacgcgcgatttgagggattacaaagccaccggcccgcacgttgccgttgcgaagaggctcgcggcgcgtggagtgaaaatccggcccggcacggtgataagctacatcgtcctaaagggctctggaaggataggcgacagggcgattccagctgatgagttcgacccgacgaagcaccgctacgatgcggaatactacatcgagaaccaggttctcccggcggtggagaggattctaaaagccttcggctatcggaaggaggatttgcgctaccagaagacgaagcaggtcggctcgggcgcgtggctgaaggtgaaggggaagaagggtaccgaagcttacgtagaacaaaaactcatctcagaagaggatctgaatagcgccgtcgaccatcatcatcatcatcattga

SEQ ID NO: 520 - protein, 802 aa, Artificial Sequence
  Description of Artificial Sequence:Thermococcus species 9degreesN-7 mutant DNA polymerase, 9degreesN mutant
MILDTDYITENGKPVIRVFKKENGEFKIEYDRTFEPYFYALLKDDSAIEDVKKVTAKRHGTVVKVKRAEKVQKKFLGRPIEVWKLYFNHPQDVPAIRDRIRAHPAVVDIYEYDIPFAKRYLIDKGLIPMEGDEELTMLAFAIATLYHEGEEFGTGPILMISYADGSEARVITWKKIDLPYVDVVSTEKEMIKRFLRVVREKDPDVLITYNGDNFDFAYLKKRCEELGIKFTLGRDGSEPKIQRMGDRFAVEVKGRIHFDLYPVIRRTINLPTYTLEAVYEAVFGKPKEKVYAEEIAQAWESGEGLERVARYSMEDAKVTYELGREFFPMEAQLSRLIGQSLWDVSRSSTGNLVEAFLLRKAYKRNELAPNKPDERELARRRGGYAGGYVKEPERGLWDNIVYLDFRSWYPSIIITHNVSPDTLNREGCKEYDVAPEVGHKFCKDFPGFIPSLLGDLLEERSKIERKMKATVDPLEKKLLVYRQWLIKILANSIYGYYGYAKARWYCKECAESVTAWGREYIEMVIRELEEKFGFKVLYADTDGLHATIPGADAETVKKKAKEFLKYINPKLPGLLELEYEGFYVRGFFVTKKKYAVIDEEGKITTRGLEIVRRDWSEIAKETQARVLEAILKHGDVEEAVRIVKEVTEKLSKYEVPPEKLVIHEQITRDLRDYKATGPHVAVAKRLAARGVKIRPGTVISYIVLKGSGRIGDRAIPADEFDPTKHRYDAEYYIENQVLPAVERILKAFGYRKEDLRYQKTKQVGSGAWLKVKGKKGTEAYVEQKLISEEDLNSAVDHHHHHH

SEQ ID NO: 521 - DNA, 2409 bp, Artificial Sequence
  Description of Artificial Sequence:Thermococcus species 9degreesN-7 mutant DNA polymerase, 9degreesN mutant
atgattctcgataccgactacatcaccgagaacgggaagcccgtgataagggtcttcaagaaggagaacggcgagtttaaaatcgagtacgacagaaccttcgagccctacttctacgcccttctgaaggacgattctgcgatagaggacgtcaagaaggtaaccgcaaagaggcacggaacggttgtcaaggtgaagcgcgccgagaaggtgcagaagaagttcctcggcaggccgatagaggtctggaagctctacttcaaccatcctcaggacgtcccggcgattcgagacaggatacgcgcccaccccgctgtcgttgacatctacgagtacgacatacccttcgccaagcgctacctcatcgacaagggcctgattccgatggagggcgacgaggagcttacgatgctcgccttcgcgatcgcaaccctctatcacgagggcgaggagttcggaaccgggccgattctcatgataagctacgccgacgggagcgaggcgagggtgataacctggaagaagattgaccttccgtacgttgacgtcgtctcgaccgagaaggagatgattaagcgcttcctccgcgtcgtcagggagaaggaccccgacgtgctcatcacctacaacggcgacaacttcgacttcgcctacctgaagaagcgctgtgaggaactcggaataaagttcacactcggcagggacgggagcgagccgaagatacagcgaatgggcgaccgctttgccgttgaggtgaagggcaggattcacttcgacctctaccccgtcataaggcgcacgataaacctcccgacctacacccttgaggccgtttacgaggccgtctttggaaagcccaaggagaaggtttacgcagaggagatagcgcaggcctgggagagcggggagggccttgaaagggttgcaagatactcgatggaggacgctaaggtgacctacgagctgggaagggagttcttcccgatggaggcccagctttcgaggcttataggccagagcctctgggacgtctcgcgctcgagcaccggaaatttggtggaggcattcctcctgcggaaggcctacaagaggaacgagctcgccccaaacaagcccgacgagagggagctcgcgagacggcgcgggggctacgctggcgggtacgttaaggaaccagagcggggattgtgggacaacattgtgtatttagacttccgctcgtggtatccttcaatcatcataacccacaacgtctcgccggataccctcaaccgcgagggctgtaaagagtacgacgtcgcccctgaggttggacacaagttctgcaaggacttccccggcttcataccaagcctcctgggagatttgctcgaggagaggagcaagatagagcggaagatgaaggcaacggttgacccgctggagaagaaactcctcgtgtacaggcagtggcttataaaaatcctcgccaacagcgcatacggctactacggctacgccaaggcccggtggtactgcaaggagtgcgccgagagcgttacggcctggggaagggagtatatagaaatggttatccgggaactcgaagaaaaattcggttttaaagttctctatgccgatacagacggtctccatgctaccattcccggagcagacgctgaaacagtcaagaaaaaagcaaaggagttcttaaaatacattaatccaaaactgcccggcctgctcgaacttgagtacgagggcttctacgtgaggggcttcttcgtcacgaagaagaagtacgctgtgatagacgaggagggcaagataaccacgaggggtcttgagattgtgaggcgcgactggagcgagatagcgaaggagacccaggccagggtcttagaggcgatactcaagcacggtgacgtcgaggaggccgttaggatagtcaaggaagtgacggaaaagctgagcaagtatgaggtcccgcccgagaagctggtaatccacgagcagataacgcgcgatttgagggattacaaagccaccggcccgcacgttgccgttgcgaagaggctcgcggcgcgtggagtgaaaatccggcccggcacggtgataagctacatcgtcctaaagggctctggaaggataggcgacagggcgattccagctgatgagttcgacccgacgaagcaccgctacgatgcggaatactacatcgagaaccaggttctcccggcggtggagaggattctaaaagccttcggctatcggaaggaggatttgcgctaccagaagacgaagcaggtcggctcgggcgcgtggctgaaggtgaaggggaagaagggtaccgaagcttacgtagaacaaaaactcatctcagaagaggatctgaatagcgccgtcgaccatcatcatcatcatcattga

SEQ ID NO: 522 - protein, 802 aa, Artificial Sequence
  Description of Artificial Sequence:Thermococcus species 9degreesN-7 mutant DNA polymerase, 9degreesN mutant
MILDTDYITENGKPVIRVFKKENGEFKIEYDRTFEPYFYALLKDDSAIEDVKKVTAKRHGTVVKVKRAEKVQKKFLGRPIEVWKLYFNHPQDVPAIRDRIRAHPAVVDIYEYDIPFAKRYLIDKGLIPMEGDEELTMLAFAIATLYHEGEEFGTGPILMISYADGSEARVITWKKIDLPYVDVVSTEKEMIKRFLRVVREKDPDVLITYNGDNFDFAYLKKRCEELGIKFTLGRDGSEPKIQRMGDRFAVEVKGRIHFDLYPVIRRTINLPTYTLEAVYEAVFGKPKEKVYAEEIAQAWESGEGLERVARYSMEDAKVTYELGREFFPMEAQLSRLIGQSLWDVSRSSTGNLVEAFLLRKAYKRNELAPNKPDERELARRRGGYAGGYVKEPERGLWDNIVYLDFRSWYPSIIITHNVSPDTLNREGCKEYDVAPEVGHKFCKDFPGFIPSLLGDLLEERSKIERKMKATVDPLEKKLLVYRQWLIKILANSAYGYYGYAKARWYCKECAESVTAWGREYIEMVIRELEEKFGFKVLYADTDGLHATIPGADAETVKKKAKEFLKYINPKLPGLLELEYEGFYVRGFFVTKKKYAVIDEEGKITTRGLEIVRRDWSEIAKETQARVLEAILKHGDVEEAVRIVKEVTEKLSKYEVPPEKLVIHEQITRDLRDYKATGPHVAVAKRLAARGVKIRPGTVISYIVLKGSGRIGDRAIPADEFDPTKHRYDAEYYIENQVLPAVERILKAFGYRKEDLRYQKTKQVGSGAWLKVKGKKGTEAYVEQKLISEEDLNSAVDHHHHHH

SEQ ID NO: 523 - DNA, 2409 bp, Artificial Sequence
  Description of Artificial Sequence:Thermococcus species 9degreesN-7 mutant DNA polymerase, 9degreesN mutant
atgattctcgataccgactacatcaccgagaacgggaagcccgtgataagggtcttcaagaaggagaacggcgagtttaaaatcgagtacgacagaaccttcgagccctacttctacgcccttctgaaggacgattctgcgatagaggacgtcaagaaggtaaccgcaaagaggcacggaacggttgtcaaggtgaagcgcgccgagaaggtgcagaagaagttcctcggcaggccgatagaggtctggaagctctacttcaaccatcctcaggacgtcccggcgattcgagacaggatacgcgcccaccccgctgtcgttgacatctacgagtacgacatacccttcgccaagcgctacctcatcgacaagggcctgattccgatggagggcgacgaggagcttacgatgctcgccttcgcgatcgcaaccctctatcacgagggcgaggagttcggaaccgggccgattctcatgataagctacgccgacgggagcgaggcgagggtgataacctggaagaagattgaccttccgtacgttgacgtcgtctcgaccgagaaggagatgattaagcgcttcctccgcgtcgtcagggagaaggaccccgacgtgctcatcacctacaacggcgacaacttcgacttcgcctacctgaagaagcgctgtgaggaactcggaataaagttcacactcggcagggacgggagcgagccgaagatacagcgaatgggcgaccgctttgccgttgaggtgaagggcaggattcacttcgacctctaccccgtcataaggcgcacgataaacctcccgacctacacccttgaggccgtttacgaggccgtctttggaaagcccaaggagaaggtttacgcagaggagatagcgcaggcctgggagagcggggagggccttgaaagggttgcaagatactcgatggaggacgctaaggtgacctacgagctgggaagggagttcttcccgatggaggcccagctttcgaggcttataggccagagcctctgggacgtctcgcgctcgagcaccggaaatttggtggaggcattcctcctgcggcgagcctacaagaggaacgagctcgccccaaacaagcccgacgagagggagctcgcgagacggcgcgggggctacgctggcgggtacgttaaggaaccagagcggggattgtgggacaacattgtgtatttagacttccgctcgtggtatccttcaatcatcataacccacaacgtctcgccggataccctcaaccgcgagggctgtaaagagtacgacgtcgcccctgaggttggacacaagttctgcaaggacttccccggcttcataccaagcctcctgggagatttgctcgaggagaggagcaagatagagcggaagatgaaggcaacggttgacccgctggagaagaaactcctcgtgtacaggcagtggcttataaaaatcctcgccaacagcttctacggctactacggctacgccaaggcccggtggtactgcaaggagtgcgccgagagcgttacggcctggggaagggagtatatagaaatggttatccgggaactcgaagaaaaattcggttttaaagttctctatgccgatacagacggtctccatgctaccattcccggagcagacgctgaaacagtcaagaaaaaagcaaaggagttcttaaaatacattaatccaaaactgcccggcctgctcgaacttgagtacgagggcttctacgtgaggggcttcttcgtcacgaagaagaagtacgctgtgatagacgaggagggcaagataaccacgaggggtcttgagattgtgaggcgcgactggagcgagatagcgaaggagacccaggccagggtcttagaggcgatactcaagcacggtgacgtcgaggaggccgttaggatagtcaaggaagtgacggaaaagctgagcaagtatgaggtcccgcccgagaagctggtaatccacgagcagataacgcgcgatttgagggattacaaagccaccggcccgcacgttgccgttgcgaagaggctcgcggcgcgtggagtgaaaatccggcccggcacggtgataagctacatcgtcctaaagggctctggaaggataggcgacagggcgattccagctgatgagttcgacccgacgaagcaccgctacgatgcggaatactacatcgagaaccaggttctcccggcggtggagaggattctaaaagccttcggctatcggaaggaggatttgcgctaccagaagacgaagcaggtcggctcgggcgcgtggctgaaggtgaaggggaagaagggtaccgaagcttacgtagaacaaaaactcatctcagaagaggatctgaatagcgccgtcgaccatcatcatcatcatcattga

SEQ ID NO: 524 - protein, 802 aa, Artificial Sequence
  Description of Artificial Sequence:Thermococcus species 9degreesN-7 mutant DNA polymerase, 9degreesN mutant
MILDTDYITENGKPVIRVFKKENGEFKIEYDRTFEPYFYALLKDDSAIEDVKKVTAKRHGTVVKVKRAEKVQKKFLGRPIEVWKLYFNHPQDVPAIRDRIRAHPAVVDIYEYDIPFAKRYLIDKGLIPMEGDEELTMLAFAIATLYHEGEEFGTGPILMISYADGSEARVITWKKIDLPYVDVVSTEKEMIKRFLRVVREKDPDVLITYNGDNFDFAYLKKRCEELGIKFTLGRDGSEPKIQRMGDRFAVEVKGRIHFDLYPVIRRTINLPTYTLEAVYEAVFGKPKEKVYAEEIAQAWESGEGLERVARYSMEDAKVTYELGREFFPMEAQLSRLIGQSLWDVSRSSTGNLVEAFLLRRAYKRNELAPNKPDERELARRRGGYAGGYVKEPERGLWDNIVYLDFRSWYPSIIITHNVSPDTLNREGCKEYDVAPEVGHKFCKDFPGFIPSLLGDLLEERSKIERKMKATVDPLEKKLLVYRQWLIKILANSFYGYYGYAKARWYCKECAESVTAWGREYIEMVIRELEEKFGFKVLYADTDGLHATIPGADAETVKKKAKEFLKYINPKLPGLLELEYEGFYVRGFFVTKKKYAVIDEEGKITTRGLEIVRRDWSEIAKETQARVLEAILKHGDVEEAVRIVKEVTEKLSKYEVPPEKLVIHEQITRDLRDYKATGPHVAVAKRLAARGVKIRPGTVISYIVLKGSGRIGDRAIPADEFDPTKHRYDAEYYIENQVLPAVERILKAFGYRKEDLRYQKTKQVGSGAWLKVKGKKGTEAYVEQKLISEEDLNSAVDHHHHHH

SEQ ID NO: 525 - DNA, 2409 bp, Artificial Sequence
  Description of Artificial Sequence:Thermococcus species 9degreesN-7 mutant DNA polymerase, 9degreesN mutant
atgattctcgataccgactacatcaccgagaacgggaagcccgtgataagggtcttcaagaaggagaacggcgagtttaaaatcgagtacgacagaaccttcgagccctacttctacgcccttctgaaggacgattctgcgatagaggacgtcaagaaggtaaccgcaaagaggcacggaacggttgtcaaggtgaagcgcgccgagaaggtgcagaagaagttcctcggcaggccgatagaggtctggaagctctacttcaaccatcctcaggacgtcccggcgattcgagacaggatacgcgcccaccccgctgtcgttgacatctacgagtacgacatacccttcgccaagcgctacctcatcgacaagggcctgattccgatggagggcgacgaggagcttacgatgctcgccttcgcgatcgcaaccctctatcacgagggcgaggagttcggaaccgggccgattctcatgataagctacgccgacgggagcgaggcgagggtgataacctggaagaagattgaccttccgtacgttgacgtcgtctcgaccgagaaggagatgattaagcgcttcctccgcgtcgtcagggagaaggaccccgacgtgctcatcacctacaacggcgacaacttcgacttcgcctacctgaagaagcgctgtgaggaactcggaataaagttcacactcggcagggacgggagcgagccgaagatacagcgaatgggcgaccgctttgccgttgaggtgaagggcaggattcacttcgacctctaccccgtcataaggcgcacgataaacctcccgacctacacccttgaggccgtttacgaggccgtctttggaaagcccaaggagaaggtttacgcagaggagatagcgcaggcctgggagagcggggagggccttgaaagggttgcaagatactcgatggaggacgctaaggtgacctacgagctgggaagggagttcttcccgatggaggcccagctttcgaggcttataggccagagcctctgggacgtctcgcgctcgagcaccggaaatttggtggaggcattcctcctgcggcttgcctacaagaggaacgagctcgccccaaacaagcccgacgagagggagctcgcgagacggcgcgggggctacgctggcgggtacgttaaggaaccagagcggggattgtgggacaacattgtgtatttagacttccgctcgtggtatccttcaatcatcataacccacaacgtctcgccggataccctcaaccgcgagggctgtaaagagtacgacgtcgcccctgaggttggacacaagttctgcaaggacttccccggcttcataccaagcctcctgggagatttgctcgaggagaggagcaagatagagcggaagatgaaggcaacggttgacccgctggagaagaaactcctcgtgtacaggcagtggcttataaaaatcctcgccaacagcttctacggctactacggctacgccaaggcccggtggtactgcaaggagtgcgccgagagcgttacggcctggggaagggagtatatagaaatggttatccgggaactcgaagaaaaattcggttttaaagttctctatgccgatacagacggtctccatgctaccattcccggagcagacgctgaaacagtcaagaaaaaagcaaaggagttcttaaaatacattaatccaaaactgcccggcctgctcgaacttgagtacgagggcttctacgtgaggggcttcttcgtcacgaagaagaagtacgctgtgatagacgaggagggcaagataaccacgaggggtcttgagattgtgaggcgcgactggagcgagatagcgaaggagacccaggccagggtcttagaggcgatactcaagcacggtgacgtcgaggaggccgttaggatagtcaaggaagtgacggaaaagctgagcaagtatgaggtcccgcccgagaagctggtaatccacgagcagataacgcgcgatttgagggattacaaagccaccggcccgcacgttgccgttgcgaagaggctcgcggcgcgtggagtgaaaatccggcccggcacggtgataagctacatcgtcctaaagggctctggaaggataggcgacagggcgattccagctgatgagttcgacccgacgaagcaccgctacgatgcggaatactacatcgagaaccaggttctcccggcggtggagaggattctaaaagccttcggctatcggaaggaggatttgcgctaccagaagacgaagcaggtcggctcgggcgcgtggctgaaggtgaaggggaagaagggtaccgaagcttacgtagaacaaaaactcatctcagaagaggatctgaatagcgccgtcgaccatcatcatcatcatcattga

SEQ ID NO: 526 - protein, 802 aa, Artificial Sequence
  Description of Artificial Sequence:Thermococcus species 9degreesN-7 mutant DNA polymerase, 9degreesN mutant
MILDTDYITENGKPVIRVFKKENGEFKIEYDRTFEPYFYALLKDDSAIEDVKKVTAKRHGTVVKVKRAEKVQKKFLGRPIEVWKLYFNHPQDVPAIRDRIRAHPAVVDIYEYDIPFAKRYLIDKGLIPMEGDEELTMLAFAIATLYHEGEEFGTGPILMISYADGSEARVITWKKIDLPYVDVVSTEKEMIKRFLRVVREKDPDVLITYNGDNFDFAYLKKRCEELGIKFTLGRDGSEPKIQRMGDRFAVEVKGRIHFDLYPVIRRTINLPTYTLEAVYEAVFGKPKEKVYAEEIAQAWESGEGLERVARYSMEDAKVTYELGREFFPMEAQLSRLIGQSLWDVSRSSTGNLVEAFLLRLAYKRNELAPNKPDERELARRRGGYAGGYVKEPERGLWDNIVYLDFRSWYPSIIITHNVSPDTLNREGCKEYDVAPEVGHKFCKDFPGFIPSLLGDLLEERSKIERKMKATVDPLEKKLLVYRQWLIKILANSFYGYYGYAKARWYCKECAESVTAWGREYIEMVIRELEEKFGFKVLYADTDGLHATIPGADAETVKKKAKEFLKYINPKLPGLLELEYEGFYVRGFFVTKKKYAVIDEEGKITTRGLEIVRRDWSEIAKETQARVLEAILKHGDVEEAVRIVKEVTEKLSKYEVPPEKLVIHEQITRDLRDYKATGPHVAVAKRLAARGVKIRPGTVISYIVLKGSGRIGDRAIPADEFDPTKHRYDAEYYIENQVLPAVERILKAFGYRKEDLRYQKTKQVGSGAWLKVKGKKGTEAYVEQKLISEEDLNSAVDHHHHHH

SEQ ID NO: 527 - DNA, 2409 bp, Artificial Sequence
  Description of Artificial Sequence:Thermococcus species 9degreesN-7 mutant DNA polymerase, 9degreesN mutant
atgattctcgataccgactacatcaccgagaacgggaagcccgtgataagggtcttcaagaaggagaacggcgagtttaaaatcgagtacgacagaaccttcgagccctacttctacgcccttctgaaggacgattctgcgatagaggacgtcaagaaggtaaccgcaaagaggcacggaacggttgtcaaggtgaagcgcgccgagaaggtgcagaagaagttcctcggcaggccgatagaggtctggaagctctacttcaaccatcctcaggacgtcccggcgattcgagacaggatacgcgcccaccccgctgtcgttgacatctacgagtacgacatacccttcgccaagcgctacctcatcgacaagggcctgattccgatggagggcgacgaggagcttacgatgctcgccttcgcgatcgcaaccctctatcacgagggcgaggagttcggaaccgggccgattctcatgataagctacgccgacgggagcgaggcgagggtgataacctggaagaagattgaccttccgtacgttgacgtcgtctcgaccgagaaggagatgattaagcgcttcctccgcgtcgtcagggagaaggaccccgacgtgctcatcacctacaacggcgacaacttcgacttcgcctacctgaagaagcgctgtgaggaactcggaataaagttcacactcggcagggacgggagcgagccgaagatacagcgaatgggcgaccgctttgccgttgaggtgaagggcaggattcacttcgacctctaccccgtcataaggcgcacgataaacctcccgacctacacccttgaggccgtttacgaggccgtctttggaaagcccaaggagaaggtttacgcagaggagatagcgcaggcctgggagagcggggagggccttgaaagggttgcaagatactcgatggaggacgctaaggtgacctacgagctgggaagggagttcttcccgatggaggcccagctttcgaggcttataggccagagcctctgggacgtctcgcgctcgagcaccggaaatttggtggaggcattcctcctgcgggtggcctacaagaggaacgagctcgccccaaacaagcccgacgagagggagctcgcgagacggcgcgggggctacgctggcgggtacgttaaggaaccagagcggggattgtgggacaacattgtgtatttagacttccgctcgtggtatccttcaatcatcataacccacaacgtctcgccggataccctcaaccgcgagggctgtaaagagtacgacgtcgcccctgaggttggacacaagttctgcaaggacttccccggcttcataccaagcctcctgggagatttgctcgaggagaggagcaagatagagcggaagatgaaggcaacggttgacccgctggagaagaaactcctcgtgtacaggcagtggcttataaaaatcctcgccaacagcttctacggctactacggctacgccaaggcccggtggtactgcaaggagtgcgccgagagcgttacggcctggggaagggagtatatagaaatggttatccgggaactcgaagaaaaattcggttttaaagttctctatgccgatacagacggtctccatgctaccattcccggagcagacgctgaaacagtcaagaaaaaagcaaaggagttcttaaaatacattaatccaaaactgcccggcctgctcgaacttgagtacgagggcttctacgtgaggggcttcttcgtcacgaagaagaagtacgctgtgatagacgaggagggcaagataaccacgaggggtcttgagattgtgaggcgcgactggagcgagatagcgaaggagacccaggccagggtcttagaggcgatactcaagcacggtgacgtcgaggaggccgttaggatagtcaaggaagtgacggaaaagctgagcaagtatgaggtcccgcccgagaagctggtaatccacgagcagataacgcgcgatttgagggattacaaagccaccggcccgcacgttgccgttgcgaagaggctcgcggcgcgtggagtgaaaatccggcccggcacggtgataagctacatcgtcctaaagggctctggaaggataggcgacagggcgattccagctgatgagttcgacccgacgaagcaccgctacgatgcggaatactacatcgagaaccaggttctcccggcggtggagaggattctaaaagccttcggctatcggaaggaggatttgcgctaccagaagacgaagcaggtcggctcgggcgcgtggctgaaggtgaaggggaagaagggtaccgaagcttacgtagaacaaaaactcatctcagaagaggatctgaatagcgccgtcgaccatcatcatcatcatcattga

SEQ ID NO: 528 - protein, 802 aa, Artificial Sequence
  Description of Artificial Sequence:Thermococcus species 9degreesN-7 mutant DNA polymerase, 9degreesN mutant
MILDTDYITENGKPVIRVFKKENGEFKIEYDRTFEPYFYALLKDDSAIEDVKKVTAKRHGTVVKVKRAEKVQKKFLGRPIEVWKLYFNHPQDVPAIRDRIRAHPAVVDIYEYDIPFAKRYLIDKGLIPMEGDEELTMLAFAIATLYHEGEEFGTGPILMISYADGSEARVITWKKIDLPYVDVVSTEKEMIKRFLRVVREKDPDVLITYNGDNFDFAYLKKRCEELGIKFTLGRDGSEPKIQRMGDRFAVEVKGRIHFDLYPVIRRTINLPTYTLEAVYEAVFGKPKEKVYAEEIAQAWESGEGLERVARYSMEDAKVTYELGREFFPMEAQLSRLIGQSLWDVSRSSTGNLVEAFLLRVAYKRNELAPNKPDERELARRRGGYAGGYVKEPERGLWDNIVYLDFRSWYPSIIITHNVSPDTLNREGCKEYDVAPEVGHKFCKDFPGFIPSLLGDLLEERSKIERKMKATVDPLEKKLLVYRQWLIKILANSFYGYYGYAKARWYCKECAESVTAWGREYIEMVIRELEEKFGFKVLYADTDGLHATIPGADAETVKKKAKEFLKYINPKLPGLLELEYEGFYVRGFFVTKKKYAVIDEEGKITTRGLEIVRRDWSEIAKETQARVLEAILKHGDVEEAVRIVKEVTEKLSKYEVPPEKLVIHEQITRDLRDYKATGPHVAVAKRLAARGVKIRPGTVISYIVLKGSGRIGDRAIPADEFDPTKHRYDAEYYIENQVLPAVERILKAFGYRKEDLRYQKTKQVGSGAWLKVKGKKGTEAYVEQKLISEEDLNSAVDHHHHHH

SEQ ID NO: 529 - DNA, 2409 bp, Artificial Sequence
  Description of Artificial Sequence:Thermococcus species 9degreesN-7 mutant DNA polymerase, 9degreesN mutant
atgattctcgataccgactacatcaccgagaacgggaagcccgtgataagggtcttcaagaaggagaacggcgagtttaaaatcgagtacgacagaaccttcgagccctacttctacgcccttctgaaggacgattctgcgatagaggacgtcaagaaggtaaccgcaaagaggcacggaacggttgtcaaggtgaagcgcgccgagaaggtgcagaagaagttcctcggcaggccgatagaggtctggaagctctacttcaaccatcctcaggacgtcccggcgattcgagacaggatacgcgcccaccccgctgtcgttgacatctacgagtacgacatacccttcgccaagcgctacctcatcgacaagggcctgattccgatggagggcgacgaggagcttacgatgctcgccttcgcgatcgcaaccctctatcacgagggcgaggagttcggaaccgggccgattctcatgataagctacgccgacgggagcgaggcgagggtgataacctggaagaagattgaccttccgtacgttgacgtcgtctcgaccgagaaggagatgattaagcgcttcctccgcgtcgtcagggagaaggaccccgacgtgctcatcacctacaacggcgacaacttcgacttcgcctacctgaagaagcgctgtgaggaactcggaataaagttcacactcggcagggacgggagcgagccgaagatacagcgaatgggcgaccgctttgccgttgaggtgaagggcaggattcacttcgacctctaccccgtcataaggcgcacgataaacctcccgacctacacccttgaggccgtttacgaggccgtctttggaaagcccaaggagaaggtttacgcagaggagatagcgcaggcctgggagagcggggagggccttgaaagggttgcaagatactcgatggaggacgctaaggtgacctacgagctgggaagggagttcttcccgatggaggcccagctttcgaggcttataggccagagcctctgggacgtctcgcgctcgagcaccggaaatttggtggaggcattcctcctgcggacggcctacaagaggaacgagctcgccccaaacaagcccgacgagagggagctcgcgagacggcgcgggggctacgctggcgggtacgttaaggaaccagagcggggattgtgggacaacattgtgtatttagacttccgctcgtggtatccttcaatcatcataacccacaacgtctcgccggataccctcaaccgcgagggctgtaaagagtacgacgtcgcccctgaggttggacacaagttctgcaaggacttccccggcttcataccaagcctcctgggagatttgctcgaggagaggagcaagatagagcggaagatgaaggcaacggttgacccgctggagaagaaactcctcgtgtacaggcagtggcttataaaaatcctcgccaacagcttctacggctactacggctacgccaaggcccggtggtactgcaaggagtgcgccgagagcgttacggcctggggaagggagtatatagaaatggttatccgggaactcgaagaaaaattcggttttaaagttctctatgccgatacagacggtctccatgctaccattcccggagcagacgctgaaacagtcaagaaaaaagcaaaggagttcttaaaatacattaatccaaaactgcccggcctgctcgaacttgagtacgagggcttctacgtgaggggcttcttcgtcacgaagaagaagtacgctgtgatagacgaggagggcaagataaccacgaggggtcttgagattgtgaggcgcgactggagcgagatagcgaaggagacccaggccagggtcttagaggcgatactcaagcacggtgacgtcgaggaggccgttaggatagtcaaggaagtgacggaaaagctgagcaagtatgaggtcccgcccgagaagctggtaatccacgagcagataacgcgcgatttgagggattacaaagccaccggcccgcacgttgccgttgcgaagaggctcgcggcgcgtggagtgaaaatccggcccggcacggtgataagctacatcgtcctaaagggctctggaaggataggcgacagggcgattccagctgatgagttcgacccgacgaagcaccgctacgatgcggaatactacatcgagaaccaggttctcccggcggtggagaggattctaaaagccttcggctatcggaaggaggatttgcgctaccagaagacgaagcaggtcggctcgggcgcgtggctgaaggtgaaggggaagaagggtaccgaagcttacgtagaacaaaaactcatctcagaagaggatctgaatagcgccgtcgaccatcatcatcatcatcattga

SEQ ID NO: 530 - protein, 802 aa, Artificial Sequence
  Description of Artificial Sequence:Thermococcus species 9degreesN-7 mutant DNA polymerase, 9degreesN mutant
MILDTDYITENGKPVIRVFKKENGEFKIEYDRTFEPYFYALLKDDSAIEDVKKVTAKRHGTVVKVKRAEKVQKKFLGRPIEVWKLYFNHPQDVPAIRDRIRAHPAVVDIYEYDIPFAKRYLIDKGLIPMEGDEELTMLAFAIATLYHEGEEFGTGPILMISYADGSEARVITWKKIDLPYVDVVSTEKEMIKRFLRVVREKDPDVLITYNGDNFDFAYLKKRCEELGIKFTLGRDGSEPKIQRMGDRFAVEVKGRIHFDLYPVIRRTINLPTYTLEAVYEAVFGKPKEKVYAEEIAQAWESGEGLERVARYSMEDAKVTYELGREFFPMEAQLSRLIGQSLWDVSRSSTGNLVEAFLLRTAYKRNELAPNKPDERELARRRGGYAGGYVKEPERGLWDNIVYLDFRSWYPSIIITHNVSPDTLNREGCKEYDVAPEVGHKFCKDFPGFIPSLLGDLLEERSKIERKMKATVDPLEKKLLVYRQWLIKILANSFYGYYGYAKARWYCKECAESVTAWGREYIEMVIRELEEKFGFKVLYADTDGLHATIPGADAETVKKKAKEFLKYINPKLPGLLELEYEGFYVRGFFVTKKKYAVIDEEGKITTRGLEIVRRDWSEIAKETQARVLEAILKHGDVEEAVRIVKEVTEKLSKYEVPPEKLVIHEQITRDLRDYKATGPHVAVAKRLAARGVKIRPGTVISYIVLKGSGRIGDRAIPADEFDPTKHRYDAEYYIENQVLPAVERILKAFGYRKEDLRYQKTKQVGSGAWLKVKGKKGTEAYVEQKLISEEDLNSAVDHHHHHH

SEQ ID NO: 531 - DNA, 2409 bp, Artificial Sequence
  Description of Artificial Sequence:Thermococcus species 9degreesN-7 mutant DNA polymerase, 9degreesN mutant
atgattctcgataccgactacatcaccgagaacgggaagcccgtgataagggtcttcaagaaggagaacggcgagtttaaaatcgagtacgacagaaccttcgagccctacttctacgcccttctgaaggacgattctgcgatagaggacgtcaagaaggtaaccgcaaagaggcacggaacggttgtcaaggtgaagcgcgccgagaaggtgcagaagaagttcctcggcaggccgatagaggtctggaagctctacttcaaccatcctcaggacgtcccggcgattcgagacaggatacgcgcccaccccgctgtcgttgacatctacgagtacgacatacccttcgccaagcgctacctcatcgacaagggcctgattccgatggagggcgacgaggagcttacgatgctcgccttcgcgatcgcaaccctctatcacgagggcgaggagttcggaaccgggccgattctcatgataagctacgccgacgggagcgaggcgagggtgataacctggaagaagattgaccttccgtacgttgacgtcgtctcgaccgagaaggagatgattaagcgcttcctccgcgtcgtcagggagaaggaccccgacgtgctcatcacctacaacggcgacaacttcgacttcgcctacctgaagaagcgctgtgaggaactcggaataaagttcacactcggcagggacgggagcgagccgaagatacagcgaatgggcgaccgctttgccgttgaggtgaagggcaggattcacttcgacctctaccccgtcataaggcgcacgataaacctcccgacctacacccttgaggccgtttacgaggccgtctttggaaagcccaaggagaaggtttacgcagaggagatagcgcaggcctgggagagcggggagggccttgaaagggttgcaagatactcgatggaggacgctaaggtgacctacgagctgggaagggagttcttcccgatggaggcccagctttcgaggcttataggccagagcctctgggacgtctcgcgctcgagcaccggaaatttggtggaggcattcctcctgcgggcagcctacaagaggaacgagctcgccccaaacaagcccgacgagagggagctcgcgagacggcgcgggggctacgctggcgggtacgttaaggaaccagagcggggattgtgggacaacattgtgtatttagacttccgctcgtggtatccttcaatcatcataacccacaacgtctcgccggataccctcaaccgcgagggctgtaaagagtacgacgtcgcccctgaggttggacacaagttctgcaaggacttccccggcttcataccaagcctcctgggagatttgctcgaggagaggagcaagatagagcggaagatgaaggcaacggttgacccgctggagaagaaactcctcgtgtacaggcagtggcttataaaaatcctcgccaacagcttctacggctactacggctacgccaaggcccggtggtactgcaaggagtgcgccgagagcgttacggcctggggaagggagtatatagaaatggttatccgggaactcgaagaaaaattcggttttaaagttctctatgccgatacagacggtctccatgctaccattcccggagcagacgctgaaacagtcaagaaaaaagcaaaggagttcttaaaatacattaatccaaaactgcccggcctgctcgaacttgagtacgagggcttctacgtgaggggcttcttcgtcacgaagaagaagtacgctgtgatagacgaggagggcaagataaccacgaggggtcttgagattgtgaggcgcgactggagcgagatagcgaaggagacccaggccagggtcttagaggcgatactcaagcacggtgacgtcgaggaggccgttaggatagtcaaggaagtgacggaaaagctgagcaagtatgaggtcccgcccgagaagctggtaatccacgagcagataacgcgcgatttgagggattacaaagccaccggcccgcacgttgccgttgcgaagaggctcgcggcgcgtggagtgaaaatccggcccggcacggtgataagctacatcgtcctaaagggctctggaaggataggcgacagggcgattccagctgatgagttcgacccgacgaagcaccgctacgatgcggaatactacatcgagaaccaggttctcccggcggtggagaggattctaaaagccttcggctatcggaaggaggatttgcgctaccagaagacgaagcaggtcggctcgggcgcgtggctgaaggtgaaggggaagaagggtaccgaagcttacgtagaacaaaaactcatctcagaagaggatctgaatagcgccgtcgaccatcatcatcatcatcattga

SEQ ID NO: 532 - protein, 802 aa, Artificial Sequence
  Description of Artificial Sequence:Thermococcus species 9degreesN-7 mutant DNA polymerase, 9degreesN mutant
MILDTDYITENGKPVIRVFKKENGEFKIEYDRTFEPYFYALLKDDSAIEDVKKVTAKRHGTVVKVKRAEKVQKKFLGRPIEVWKLYFNHPQDVPAIRDRIRAHPAVVDIYEYDIPFAKRYLIDKGLIPMEGDEELTMLAFAIATLYHEGEEFGTGPILMISYADGSEARVITWKKIDLPYVDVVSTEKEMIKRFLRVVREKDPDVLITYNGDNFDFAYLKKRCEELGIKFTLGRDGSEPKIQRMGDRFAVEVKGRIHFDLYPVIRRTINLPTYTLEAVYEAVFGKPKEKVYAEEIAQAWESGEGLERVARYSMEDAKVTYELGREFFPMEAQLSRLIGQSLWDVSRSSTGNLVEAFLLRAAYKRNELAPNKPDERELARRRGGYAGGYVKEPERGLWDNIVYLDFRSWYPSIIITHNVSPDTLNREGCKEYDVAPEVGHKFCKDFPGFIPSLLGDLLEERSKIERKMKATVDPLEKKLLVYRQWLIKILANSFYGYYGYAKARWYCKECAESVTAWGREYIEMVIRELEEKFGFKVLYADTDGLHATIPGADAETVKKKAKEFLKYINPKLPGLLELEYEGFYVRGFFVTKKKYAVIDEEGKITTRGLEIVRRDWSEIAKETQARVLEAILKHGDVEEAVRIVKEVTEKLSKYEVPPEKLVIHEQITRDLRDYKATGPHVAVAKRLAARGVKIRPGTVISYIVLKGSGRIGDRAIPADEFDPTKHRYDAEYYIENQVLPAVERILKAFGYRKEDLRYQKTKQVGSGAWLKVKGKKGTEAYVEQKLISEEDLNSAVDHHHHHH

SEQ ID NO: 533 - DNA, 2409 bp, Artificial Sequence
  Description of Artificial Sequence:Thermococcus species 9degreesN-7 mutant DNA polymerase, 9degreesN mutant
atgattctcgataccgactacatcaccgagaacgggaagcccgtgataagggtcttcaagaaggagaacggcgagtttaaaatcgagtacgacagaaccttcgagccctacttctacgcccttctgaaggacgattctgcgatagaggacgtcaagaaggtaaccgcaaagaggcacggaacggttgtcaaggtgaagcgcgccgagaaggtgcagaagaagttcctcggcaggccgatagaggtctggaagctctacttcaaccatcctcaggacgtcccggcgattcgagacaggatacgcgcccaccccgctgtcgttgacatctacgagtacgacatacccttcgccaagcgctacctcatcgacaagggcctgattccgatggagggcgacgaggagcttacgatgctcgccttcgcgatcgcaaccctctatcacgagggcgaggagttcggaaccgggccgattctcatgataagctacgccgacgggagcgaggcgagggtgataacctggaagaagattgaccttccgtacgttgacgtcgtctcgaccgagaaggagatgattaagcgcttcctccgcgtcgtcagggagaaggaccccgacgtgctcatcacctacaacggcgacaacttcgacttcgcctacctgaagaagcgctgtgaggaactcggaataaagttcacactcggcagggacgggagcgagccgaagatacagcgaatgggcgaccgctttgccgttgaggtgaagggcaggattcacttcgacctctaccccgtcataaggcgcacgataaacctcccgacctacacccttgaggccgtttacgaggccgtctttggaaagcccaaggagaaggtttacgcagaggagatagcgcaggcctgggagagcggggagggccttgaaagggttgcaagatactcgatggaggacgctaaggtgacctacgagctgggaagggagttcttcccgatggaggcccagctttcgaggcttataggccagagcctctgggacgtctcgcgctcgagcaccggaaatttggtggaggcattcctcctgcggaaggcctacaagaggaacgagctcgccccaaacaagcccgacgagagggagctcgcgagacggcgcgggggctacgctggcgggtacgttaaggaaccagagcggggattgtgggacaacattgtgtatttagacttccgctcgtggtatccttcaatcatcataacccacaacgtctcgccggataccctcaaccgcgagggctgtaaagagtacgacgtcgcccctgaggttggacacaagttctgcaaggacttccccggcttcataccaagcctcctgggagatttgctcgaggagaggagcaagatagagcggaagatgaaggcaacggttgacccgctggagaagaaactcctcgtgtacaggcagtggcttataaaaatcctcgccaacagcttctacggctaccaaggctacgccaaggcccggtggtactgcaaggagtgcgccgagagcgttacggcctggggaagggagtatatagaaatggttatccgggaactcgaagaaaaattcggttttaaagttctctatgccgatacagacggtctccatgctaccattcccggagcagacgctgaaacagtcaagaaaaaagcaaaggagttcttaaaatacattaatccaaaactgcccggcctgctcgaacttgagtacgagggcttctacgtgaggggcttcttcgtcacgaagaagaagtacgctgtgatagacgaggagggcaagataaccacgaggggtcttgagattgtgaggcgcgactggagcgagatagcgaaggagacccaggccagggtcttagaggcgatactcaagcacggtgacgtcgaggaggccgttaggatagtcaaggaagtgacggaaaagctgagcaagtatgaggtcccgcccgagaagctggtaatccacgagcagataacgcgcgatttgagggattacaaagccaccggcccgcacgttgccgttgcgaagaggctcgcggcgcgtggagtgaaaatccggcccggcacggtgataagctacatcgtcctaaagggctctggaaggataggcgacagggcgattccagctgatgagttcgacccgacgaagcaccgctacgatgcggaatactacatcgagaaccaggttctcccggcggtggagaggattctaaaagccttcggctatcggaaggaggatttgcgctaccagaagacgaagcaggtcggctcgggcgcgtggctgaaggtgaaggggaagaagggtaccgaagcttacgtagaacaaaaactcatctcagaagaggatctgaatagcgccgtcgaccatcatcatcatcatcattga

SEQ ID NO: 534 - protein, 802 aa, Artificial Sequence
  Description of Artificial Sequence:Thermococcus species 9degreesN-7 mutant DNA polymerase, 9degreesN mutant
MILDTDYITENGKPVIRVFKKENGEFKIEYDRTFEPYFYALLKDDSAIEDVKKVTAKRHGTVVKVKRAEKVQKKFLGRPIEVWKLYFNHPQDVPAIRDRIRAHPAVVDIYEYDIPFAKRYLIDKGLIPMEGDEELTMLAFAIATLYHEGEEFGTGPILMISYADGSEARVITWKKIDLPYVDVVSTEKEMIKRFLRVVREKDPDVLITYNGDNFDFAYLKKRCEELGIKFTLGRDGSEPKIQRMGDRFAVEVKGRIHFDLYPVIRRTINLPTYTLEAVYEAVFGKPKEKVYAEEIAQAWESGEGLERVARYSMEDAKVTYELGREFFPMEAQLSRLIGQSLWDVSRSSTGNLVEAFLLRKAYKRNELAPNKPDERELARRRGGYAGGYVKEPERGLWDNIVYLDFRSWYPSIIITHNVSPDTLNREGCKEYDVAPEVGHKFCKDFPGFIPSLLGDLLEERSKIERKMKATVDPLEKKLLVYRQWLIKILANSFYGYQGYAKARWYCKECAESVTAWGREYIEMVIRELEEKFGFKVLYADTDGLHATIPGADAETVKKKAKEFLKYINPKLPGLLELEYEGFYVRGFFVTKKKYAVIDEEGKITTRGLEIVRRDWSEIAKETQARVLEAILKHGDVEEAVRIVKEVTEKLSKYEVPPEKLVIHEQITRDLRDYKATGPHVAVAKRLAARGVKIRPGTVISYIVLKGSGRIGDRAIPADEFDPTKHRYDAEYYIENQVLPAVERILKAFGYRKEDLRYQKTKQVGSGAWLKVKGKKGTEAYVEQKLISEEDLNSAVDHHHHHH

SEQ ID NO: 535 - DNA, 2409 bp, Artificial Sequence
  Description of Artificial Sequence:Thermococcus species 9degreesN-7 mutant DNA polymerase, 9degreesN mutant
atgattctcgataccgactacatcaccgagaacgggaagcccgtgataagggtcttcaagaaggagaacggcgagtttaaaatcgagtacgacagaaccttcgagccctacttctacgcccttctgaaggacgattctgcgatagaggacgtcaagaaggtaaccgcaaagaggcacggaacggttgtcaaggtgaagcgcgccgagaaggtgcagaagaagttcctcggcaggccgatagaggtctggaagctctacttcaaccatcctcaggacgtcccggcgattcgagacaggatacgcgcccaccccgctgtcgttgacatctacgagtacgacatacccttcgccaagcgctacctcatcgacaagggcctgattccgatggagggcgacgaggagcttacgatgctcgccttcgcgatcgcaaccctctatcacgagggcgaggagttcggaaccgggccgattctcatgataagctacgccgacgggagcgaggcgagggtgataacctggaagaagattgaccttccgtacgttgacgtcgtctcgaccgagaaggagatgattaagcgcttcctccgcgtcgtcagggagaaggaccccgacgtgctcatcacctacaacggcgacaacttcgacttcgcctacctgaagaagcgctgtgaggaactcggaataaagttcacactcggcagggacgggagcgagccgaagatacagcgaatgggcgaccgctttgccgttgaggtgaagggcaggattcacttcgacctctaccccgtcataaggcgcacgataaacctcccgacctacacccttgaggccgtttacgaggccgtctttggaaagcccaaggagaaggtttacgcagaggagatagcgcaggcctgggagagcggggagggccttgaaagggttgcaagatactcgatggaggacgctaaggtgacctacgagctgggaagggagttcttcccgatggaggcccagctttcgaggcttataggccagagcctctgggacgtctcgcgctcgagcaccggaaattcggtggaggcattcctcctgcggaaggcctacaagaggaacgagctcgccccaaacaagcccgacgagagggagctcgcgagacggcgcgggggctacgctggcgggtacgttaaggaaccagagcggggattgtgggacaacattgtgtatttagacttccgctcgtggtatccttcaatcatcataacccacaacgtctcgccggataccctcaaccgcgagggctgtaaagagtacgacgtcgcccctgaggttggacacaagttctgcaaggacttccccggcttcataccaagcctcctgggagatttgctcgaggagaggagcaagatagagcggaagatgaaggcaacggttgacccgctggagaagaaactcctcgtgtacaggcagtggcttataaaaatcctcgccaacagcttctacggctactacggctacgccaaggcccggtggtactgcaaggagtgcgccgagagcgttacggcctggggaagggagtatatagaaatggttatccgggaactcgaagaaaaattcggttttaaagttctctatgccgatacagacggtctccatgctaccattcccggagcagacgctgaaacagtcaagaaaaaagcaaaggagttcttaaaatacattaatccaaaactgcccggcctgctcgaacttgagtacgagggcttctacgtgaggggcttcttcgtcacgaagaagaagtacgctgtgatagacgaggagggcaagataaccacgaggggtcttgagattgtgaggcgcgactggagcgagatagcgaaggagacccaggccagggtcttagaggcgatactcaagcacggtgacgtcgaggaggccgttaggatagtcaaggaagtgacggaaaagctgagcaagtatgaggtcccgcccgagaagctggtaatccacgagcagataacgcgcgatttgagggattacaaagccaccggcccgcacgttgccgttgcgaagaggctcgcggcgcgtggagtgaaaatccggcccggcacggtgataagctacatcgtcctaaagggctctggaaggataggcgacagggcgattccagctgatgagttcgacccgacgaagcaccgctacgatgcggaatactacatcgagaaccaggttctcccggcggtggagaggattctaaaagccttcggctatcggaaggaggatttgcgctaccagaagacgaagcaggtcggctcgggcgcgtggctgaaggtgaaggggaagaagggtaccgaagcttacgtagaacaaaaactcatctcagaagaggatctgaatagcgccgtcgaccatcatcatcatcatcattga

SEQ ID NO: 536 - protein, 802 aa, Artificial Sequence
  Description of Artificial Sequence:Thermococcus species 9degreesN-7 mutant DNA polymerase, 9degreesN mutant
MILDTDYITENGKPVIRVFKKENGEFKIEYDRTFEPYFYALLKDDSAIEDVKKVTAKRHGTVVKVKRAEKVQKKFLGRPIEVWKLYFNHPQDVPAIRDRIRAHPAVVDIYEYDIPFAKRYLIDKGLIPMEGDEELTMLAFAIATLYHEGEEFGTGPILMISYADGSEARVITWKKIDLPYVDVVSTEKEMIKRFLRVVREKDPDVLITYNGDNFDFAYLKKRCEELGIKFTLGRDGSEPKIQRMGDRFAVEVKGRIHFDLYPVIRRTINLPTYTLEAVYEAVFGKPKEKVYAEEIAQAWESGEGLERVARYSMEDAKVTYELGREFFPMEAQLSRLIGQSLWDVSRSSTGNSVEAFLLRKAYKRNELAPNKPDERELARRRGGYAGGYVKEPERGLWDNIVYLDFRSWYPSIIITHNVSPDTLNREGCKEYDVAPEVGHKFCKDFPGFIPSLLGDLLEERSKIERKMKATVDPLEKKLLVYRQWLIKILANSFYGYYGYAKARWYCKECAESVTAWGREYIEMVIRELEEKFGFKVLYADTDGLHATIPGADAETVKKKAKEFLKYINPKLPGLLELEYEGFYVRGFFVTKKKYAVIDEEGKITTRGLEIVRRDWSEIAKETQARVLEAILKHGDVEEAVRIVKEVTEKLSKYEVPPEKLVIHEQITRDLRDYKATGPHVAVAKRLAARGVKIRPGTVISYIVLKGSGRIGDRAIPADEFDPTKHRYDAEYYIENQVLPAVERILKAFGYRKEDLRYQKTKQVGSGAWLKVKGKKGTEAYVEQKLISEEDLNSAVDHHHHHH

SEQ ID NO: 537 - DNA, 2409 bp, Artificial Sequence
  Description of Artificial Sequence:Thermococcus species 9degreesN-7 mutant DNA polymerase, 9degreesN mutant
atgattctcgataccgactacatcaccgagaacgggaagcccgtgataagggtcttcaagaaggagaacggcgagtttaaaatcgagtacgacagaaccttcgagccctacttctacgcccttctgaaggacgattctgcgatagaggacgtcaagaaggtaaccgcaaagaggcacggaacggttgtcaaggtgaagcgcgccgagaaggtgcagaagaagttcctcggcaggccgatagaggtctggaagctctacttcaaccatcctcaggacgtcccggcgattcgagacaggatacgcgcccaccccgctgtcgttgacatctacgagtacgacatacccttcgccaagcgctacctcatcgacaagggcctgattccgatggagggcgacgaggagcttacgatgctcgccttcgcgatcgcaaccctctatcacgagggcgaggagttcggaaccgggccgattctcatgataagctacgccgacgggagcgaggcgagggtgataacctggaagaagattgaccttccgtacgttgacgtcgtctcgaccgagaaggagatgattaagcgcttcctccgcgtcgtcagggagaaggaccccgacgtgctcatcacctacaacggcgacaacttcgacttcgcctacctgaagaagcgctgtgaggaactcggaataaagttcacactcggcagggacgggagcgagccgaagatacagcgaatgggcgaccgctttgccgttgaggtgaagggcaggattcacttcgacctctaccccgtcataaggcgcacgataaacctcccgacctacacccttgaggccgtttacgaggccgtctttggaaagcccaaggagaaggtttacgcagaggagatagcgcaggcctgggagagcggggagggccttgaaagggttgcaagatactcgatggaggacgctaaggtgacctacgagctgggaagggagttcttcccgatggaggccgacctttcgaggcttataggccagagcctctgggacgtctcgcgctcgagcaccggaaatttggtggaggcattcctcctgcggaaggcctacaagaggaacgagctcgccccaaacaagcccgacgagagggagctcgcgagacggcgcgggggctacgctggcgggtacgttaaggaaccagagcggggattgtgggacaacattgtgtatttagacttccgctcgtggtatccttcaatcatcataacccacaacgtctcgccggataccctcaaccgcgagggctgtaaagagtacgacgtcgcccctgaggttggacacaagttctgcaaggacttccccggcttcataccaagcctcctgggagatttgctcgaggagaggagcaagatagagcggaagatgaaggcaacggttgacccgctggagaagaaactcctcgtgtacaggcagtggcttataaaaatcctcgccaacagcttctacggctactacggctacgccaaggcccggtggtactgcaaggagtgcgccgagagcgttacggcctggggaagggagtatatagaaatggttatccgggaactcgaagaaaaattcggttttaaagttctctatgccgatacagacggtctccatgctaccattcccggagcagacgctgaaacagtcaagaaaaaagcaaaggagttcttaaaatacattaatccaaaactgcccggcctgctcgaacttgagtacgagggcttctacgtgaggggcttcttcgtcacgaagaagaagtacgctgtgatagacgaggagggcaagataaccacgaggggtcttgagattgtgaggcgcgactggagcgagatagcgaaggagacccaggccagggtcttagaggcgatactcaagcacggtgacgtcgaggaggccgttaggatagtcaaggaagtgacggaaaagctgagcaagtatgaggtcccgcccgagaagctggtaatccacgagcagataacgcgcgatttgagggattacaaagccaccggcccgcacgttgccgttgcgaagaggctcgcggcgcgtggagtgaaaatccggcccggcacggtgataagctacatcgtcctaaagggctctggaaggataggcgacagggcgattccagctgatgagttcgacccgacgaagcaccgctacgatgcggaatactacatcgagaaccaggttctcccggcggtggagaggattctaaaagccttcggctatcggaaggaggatttgcgctaccagaagacgaagcaggtcggctcgggcgcgtggctgaaggtgaaggggaagaagggtaccgaagcttacgtagaacaaaaactcatctcagaagaggatctgaatagcgccgtcgaccatcatcatcatcatcattga

SEQ ID NO: 538 - protein, 802 aa, Artificial Sequence
  Description of Artificial Sequence:Thermococcus species 9degreesN-7 mutant DNA polymerase, 9degreesN mutant
MILDTDYITENGKPVIRVFKKENGEFKIEYDRTFEPYFYALLKDDSAIEDVKKVTAKRHGTVVKVKRAEKVQKKFLGRPIEVWKLYFNHPQDVPAIRDRIRAHPAVVDIYEYDIPFAKRYLIDKGLIPMEGDEELTMLAFAIATLYHEGEEFGTGPILMISYADGSEARVITWKKIDLPYVDVVSTEKEMIKRFLRVVREKDPDVLITYNGDNFDFAYLKKRCEELGIKFTLGRDGSEPKIQRMGDRFAVEVKGRIHFDLYPVIRRTINLPTYTLEAVYEAVFGKPKEKVYAEEIAQAWESGEGLERVARYSMEDAKVTYELGREFFPMEADLSRLIGQSLWDVSRSSTGNLVEAFLLRKAYKRNELAPNKPDERELARRRGGYAGGYVKEPERGLWDNIVYLDFRSWYPSIIITHNVSPDTLNREGCKEYDVAPEVGHKFCKDFPGFIPSLLGDLLEERSKIERKMKATVDPLEKKLLVYRQWLIKILANSFYGYYGYAKARWYCKECAESVTAWGREYIEMVIRELEEKFGFKVLYADTDGLHATIPGADAETVKKKAKEFLKYINPKLPGLLELEYEGFYVRGFFVTKKKYAVIDEEGKITTRGLEIVRRDWSEIAKETQARVLEAILKHGDVEEAVRIVKEVTEKLSKYEVPPEKLVIHEQITRDLRDYKATGPHVAVAKRLAARGVKIRPGTVISYIVLKGSGRIGDRAIPADEFDPTKHRYDAEYYIENQVLPAVERILKAFGYRKEDLRYQKTKQVGSGAWLKVKGKKGTEAYVEQKLISEEDLNSAVDHHHHHH

SEQ ID NO: 539 - DNA, 2409 bp, Artificial Sequence
  Description of Artificial Sequence:Thermococcus species 9degreesN-7 mutant DNA polymerase, 9degreesN mutant
atgattctcgataccgactacatcaccgagaacgggaagcccgtgataagggtcttcaagaaggagaacggcgagtttaaaatcgagtacgacagaaccttcgagccctacttctacgcccttctgaaggacgattctgcgatagaggacgtcaagaaggtaaccgcaaagaggcacggaacggttgtcaaggtgaagcgcgccgagaaggtgcagaagaagttcctcggcaggccgatagaggtctggaagctctacttcaaccatcctcaggacgtcccggcgattcgagacaggatacgcgcccaccccgctgtcgttgacatctacgagtacgacatacccttcgccaagcgctacctcatcgacaagggcctgattccgatggagggcgacgaggagcttacgatgctcgccttcgcgatcgcaaccctctatcacgagggcgaggagttcggaaccgggccgattctcatgataagctacgccgacgggagcgaggcgagggtgataacctggaagaagattgaccttccgtacgttgacgtcgtctcgaccgagaaggagatgattaagcgcttcctccgcgtcgtcagggagaaggaccccgacgtgctcatcacctacaacggcgacaacttcgacttcgcctacctgaagaagcgctgtgaggaactcggaataaagttcacactcggcagggacgggagcgagccgaagatacagcgaatgggcgaccgctttgccgttgaggtgaagggcaggattcacttcgacctctaccccgtcataaggcgcacgataaacctcccgacctacacccttgaggccgtttacgaggccgtctttggaaagcccaaggagaaggtttacgcagaggagatagcgcaggcctgggagagcggggagggccttgaaagggttgcaagatactcgatggaggacgctaaggtgacctacgagctgggaagggagttcttcccgatggaggcctgtctttcgaggcttataggccagagcctctgggacgtctcgcgctcgagcaccggaaatttggtggaggcattcctcctgcggaaggcctacaagaggaacgagctcgccccaaacaagcccgacgagagggagctcgcgagacggcgcgggggctacgctggcgggtacgttaaggaaccagagcggggattgtgggacaacattgtgtatttagacttccgctcgtggtatccttcaatcatcataacccacaacgtctcgccggataccctcaaccgcgagggctgtaaagagtacgacgtcgcccctgaggttggacacaagttctgcaaggacttccccggcttcataccaagcctcctgggagatttgctcgaggagaggagcaagatagagcggaagatgaaggcaacggttgacccgctggagaagaaactcctcgtgtacaggcagtggcttataaaaatcctcgccaacagcttctacggctactacggctacgccaaggcccggtggtactgcaaggagtgcgccgagagcgttacggcctggggaagggagtatatagaaatggttatccgggaactcgaagaaaaattcggttttaaagttctctatgccgatacagacggtctccatgctaccattcccggagcagacgctgaaacagtcaagaaaaaagcaaaggagttcttaaaatacattaatccaaaactgcccggcctgctcgaacttgagtacgagggcttctacgtgaggggcttcttcgtcacgaagaagaagtacgctgtgatagacgaggagggcaagataaccacgaggggtcttgagattgtgaggcgcgactggagcgagatagcgaaggagacccaggccagggtcttagaggcgatactcaagcacggtgacgtcgaggaggccgttaggatagtcaaggaagtgacggaaaagctgagcaagtatgaggtcccgcccgagaagctggtaatccacgagcagataacgcgcgatttgagggattacaaagccaccggcccgcacgttgccgttgcgaagaggctcgcggcgcgtggagtgaaaatccggcccggcacggtgataagctacatcgtcctaaagggctctggaaggataggcgacagggcgattccagctgatgagttcgacccgacgaagcaccgctacgatgcggaatactacatcgagaaccaggttctcccggcggtggagaggattctaaaagccttcggctatcggaaggaggatttgcgctaccagaagacgaagcaggtcggctcgggcgcgtggctgaaggtgaaggggaagaagggtaccgaagcttacgtagaacaaaaactcatctcagaagaggatctgaatagcgccgtcgaccatcatcatcatcatcattga

SEQ ID NO: 540 - protein, 802 aa, Artificial Sequence
  Description of Artificial Sequence:Thermococcus species 9degreesN-7 mutant DNA polymerase, 9degreesN mutant
MILDTDYITENGKPVIRVFKKENGEFKIEYDRTFEPYFYALLKDDSAIEDVKKVTAKRHGTVVKVKRAEKVQKKFLGRPIEVWKLYFNHPQDVPAIRDRIRAHPAVVDIYEYDIPFAKRYLIDKGLIPMEGDEELTMLAFAIATLYHEGEEFGTGPILMISYADGSEARVITWKKIDLPYVDVVSTEKEMIKRFLRVVREKDPDVLITYNGDNFDFAYLKKRCEELGIKFTLGRDGSEPKIQRMGDRFAVEVKGRIHFDLYPVIRRTINLPTYTLEAVYEAVFGKPKEKVYAEEIAQAWESGEGLERVARYSMEDAKVTYELGREFFPMEACLSRLIGQSLWDVSRSSTGNLVEAFLLRKAYKRNELAPNKPDERELARRRGGYAGGYVKEPERGLWDNIVYLDFRSWYPSIIITHNVSPDTLNREGCKEYDVAPEVGHKFCKDFPGFIPSLLGDLLEERSKIERKMKATVDPLEKKLLVYRQWLIKILANSFYGYYGYAKARWYCKECAESVTAWGREYIEMVIRELEEKFGFKVLYADTDGLHATIPGADAETVKKKAKEFLKYINPKLPGLLELEYEGFYVRGFFVTKKKYAVIDEEGKITTRGLEIVRRDWSEIAKETQARVLEAILKHGDVEEAVRIVKEVTEKLSKYEVPPEKLVIHEQITRDLRDYKATGPHVAVAKRLAARGVKIRPGTVISYIVLKGSGRIGDRAIPADEFDPTKHRYDAEYYIENQVLPAVERILKAFGYRKEDLRYQKTKQVGSGAWLKVKGKKGTEAYVEQKLISEEDLNSAVDHHHHHH

SEQ ID NO: 541 - DNA, 2409 bp, Artificial Sequence
  Description of Artificial Sequence:Thermococcus species 9degreesN-7 mutant DNA polymerase, 9degreesN mutant
atgattctcgataccgactacatcaccgagaacgggaagcccgtgataagggtcttcaagaaggagaacggcgagtttaaaatcgagtacgacagaaccttcgagccctacttctacgcccttctgaaggacgattctgcgatagaggacgtcaagaaggtaaccgcaaagaggcacggaacggttgtcaaggtgaagcgcgccgagaaggtgcagaagaagttcctcggcaggccgatagaggtctggaagctctacttcaaccatcctcaggacgtcccggcgattcgagacaggatacgcgcccaccccgctgtcgttgacatctacgagtacgacatacccttcgccaagcgctacctcatcgacaagggcctgattccgatggagggcgacgaggagcttacgatgctcgccttcgcgatcgcaaccctctatcacgagggcgaggagttcggaaccgggccgattctcatgataagctacgccgacgggagcgaggcgagggtgataacctggaagaagattgaccttccgtacgttgacgtcgtctcgaccgagaaggagatgattaagcgcttcctccgcgtcgtcagggagaaggaccccgacgtgctcatcacctacaacggcgacaacttcgacttcgcctacctgaagaagcgctgtgaggaactcggaataaagttcacactcggcagggacgggagcgagccgaagatacagcgaatgggcgaccgctttgccgttgaggtgaagggcaggattcacttcgacctctaccccgtcataaggcgcacgataaacctcccgacctacacccttgaggccgtttacgaggccgtctttggaaagcccaaggagaaggtttacgcagaggagatagcgcaggcctgggagagcggggagggccttgaaagggttgcaagatactcgatggaggacgctaaggtgacctacgagctgggaagggagttcttcccgatggaggcccatctttcgaggcttataggccagagcctctgggacgtctcgcgctcgagcaccggaaatttggtggaggcattcctcctgcggaaggcctacaagaggaacgagctcgccccaaacaagcccgacgagagggagctcgcgagacggcgcgggggctacgctggcgggtacgttaaggaaccagagcggggattgtgggacaacattgtgtatttagacttccgctcgtggtatccttcaatcatcataacccacaacgtctcgccggataccctcaaccgcgagggctgtaaagagtacgacgtcgcccctgaggttggacacaagttctgcaaggacttccccggcttcataccaagcctcctgggagatttgctcgaggagaggagcaagatagagcggaagatgaaggcaacggttgacccgctggagaagaaactcctcgtgtacaggcagtggcttataaaaatcctcgccaacagcttctacggctactacggctacgccaaggcccggtggtactgcaaggagtgcgccgagagcgttacggcctggggaagggagtatatagaaatggttatccgggaactcgaagaaaaattcggttttaaagttctctatgccgatacagacggtctccatgctaccattcccggagcagacgctgaaacagtcaagaaaaaagcaaaggagttcttaaaatacattaatccaaaactgcccggcctgctcgaacttgagtacgagggcttctacgtgaggggcttcttcgtcacgaagaagaagtacgctgtgatagacgaggagggcaagataaccacgaggggtcttgagattgtgaggcgcgactggagcgagatagcgaaggagacccaggccagggtcttagaggcgatactcaagcacggtgacgtcgaggaggccgttaggatagtcaaggaagtgacggaaaagctgagcaagtatgaggtcccgcccgagaagctggtaatccacgagcagataacgcgcgatttgagggattacaaagccaccggcccgcacgttgccgttgcgaagaggctcgcggcgcgtggagtgaaaatccggcccggcacggtgataagctacatcgtcctaaagggctctggaaggataggcgacagggcgattccagctgatgagttcgacccgacgaagcaccgctacgatgcggaatactacatcgagaaccaggttctcccggcggtggagaggattctaaaagccttcggctatcggaaggaggatttgcgctaccagaagacgaagcaggtcggctcgggcgcgtggctgaaggtgaaggggaagaagggtaccgaagcttacgtagaacaaaaactcatctcagaagaggatctgaatagcgccgtcgaccatcatcatcatcatcattga

SEQ ID NO: 542 - protein, 802 aa, Artificial Sequence
  Description of Artificial Sequence:Thermococcus species 9degreesN-7 mutant DNA polymerase, 9degreesN mutant
MILDTDYITENGKPVIRVFKKENGEFKIEYDRTFEPYFYALLKDDSAIEDVKKVTAKRHGTVVKVKRAEKVQKKFLGRPIEVWKLYFNHPQDVPAIRDRIRAHPAVVDIYEYDIPFAKRYLIDKGLIPMEGDEELTMLAFAIATLYHEGEEFGTGPILMISYADGSEARVITWKKIDLPYVDVVSTEKEMIKRFLRVVREKDPDVLITYNGDNFDFAYLKKRCEELGIKFTLGRDGSEPKIQRMGDRFAVEVKGRIHFDLYPVIRRTINLPTYTLEAVYEAVFGKPKEKVYAEEIAQAWESGEGLERVARYSMEDAKVTYELGREFFPMEAHLSRLIGQSLWDVSRSSTGNLVEAFLLRKAYKRNELAPNKPDERELARRRGGYAGGYVKEPERGLWDNIVYLDFRSWYPSIIITHNVSPDTLNREGCKEYDVAPEVGHKFCKDFPGFIPSLLGDLLEERSKIERKMKATVDPLEKKLLVYRQWLIKILANSFYGYYGYAKARWYCKECAESVTAWGREYIEMVIRELEEKFGFKVLYADTDGLHATIPGADAETVKKKAKEFLKYINPKLPGLLELEYEGFYVRGFFVTKKKYAVIDEEGKITTRGLEIVRRDWSEIAKETQARVLEAILKHGDVEEAVRIVKEVTEKLSKYEVPPEKLVIHEQITRDLRDYKATGPHVAVAKRLAARGVKIRPGTVISYIVLKGSGRIGDRAIPADEFDPTKHRYDAEYYIENQVLPAVERILKAFGYRKEDLRYQKTKQVGSGAWLKVKGKKGTEAYVEQKLISEEDLNSAVDHHHHHH

SEQ ID NO: 543 - DNA, 2409 bp, Artificial Sequence
  Description of Artificial Sequence:Thermococcus species 9degreesN-7 mutant DNA polymerase, 9degreesN mutant
atgattctcgataccgactacatcaccgagaacgggaagcccgtgataagggtcttcaagaaggagaacggcgagtttaaaatcgagtacgacagaaccttcgagccctacttctacgcccttctgaaggacgattctgcgatagaggacgtcaagaaggtaaccgcaaagaggcacggaacggttgtcaaggtgaagcgcgccgagaaggtgcagaagaagttcctcggcaggccgatagaggtctggaagctctacttcaaccatcctcaggacgtcccggcgattcgagacaggatacgcgcccaccccgctgtcgttgacatctacgagtacgacatacccttcgccaagcgctacctcatcgacaagggcctgattccgatggagggcgacgaggagcttacgatgctcgccttcgcgatcgcaaccctctatcacgagggcgaggagttcggaaccgggccgattctcatgataagctacgccgacgggagcgaggcgagggtgataacctggaagaagattgaccttccgtacgttgacgtcgtctcgaccgagaaggagatgattaagcgcttcctccgcgtcgtcagggagaaggaccccgacgtgctcatcacctacaacggcgacaacttcgacttcgcctacctgaagaagcgctgtgaggaactcggaataaagttcacactcggcagggacgggagcgagccgaagatacagcgaatgggcgaccgctttgccgttgaggtgaagggcaggattcacttcgacctctaccccgtcataaggcgcacgataaacctcccgacctacacccttgaggccgtttacgaggccgtctttggaaagcccaaggagaaggtttacgcagaggagatagcgcaggcctgggagagcggggagggccttgaaagggttgcaagatactcgatggaggacgctaaggtgacctacgagctgggaagggagttcttcccgatggaggccacgctttcgaggcttataggccagagcctctgggacgtctcgcgctcgagcaccggaaatttggtggaggcattcctcctgcggaaggcctacaagaggaacgagctcgccccaaacaagcccgacgagagggagctcgcgagacggcgcgggggctacgctggcgggtacgttaaggaaccagagcggggattgtgggacaacattgtgtatttagacttccgctcgtggtatccttcaatcatcataacccacaacgtctcgccggataccctcaaccgcgagggctgtaaagagtacgacgtcgcccctgaggttggacacaagttctgcaaggacttccccggcttcataccaagcctcctgggagatttgctcgaggagaggagcaagatagagcggaagatgaaggcaacggttgacccgctggagaagaaactcctcgtgtacaggcagtggcttataaaaatcctcgccaacagcttctacggctactacggctacgccaaggcccggtggtactgcaaggagtgcgccgagagcgttacggcctggggaagggagtatatagaaatggttatccgggaactcgaagaaaaattcggttttaaagttctctatgccgatacagacggtctccatgctaccattcccggagcagacgctgaaacagtcaagaaaaaagcaaaggagttcttaaaatacattaatccaaaactgcccggcctgctcgaacttgagtacgagggcttctacgtgaggggcttcttcgtcacgaagaagaagtacgctgtgatagacgaggagggcaagataaccacgaggggtcttgagattgtgaggcgcgactggagcgagatagcgaaggagacccaggccagggtcttagaggcgatactcaagcacggtgacgtcgaggaggccgttaggatagtcaaggaagtgacggaaaagctgagcaagtatgaggtcccgcccgagaagctggtaatccacgagcagataacgcgcgatttgagggattacaaagccaccggcccgcacgttgccgttgcgaagaggctcgcggcgcgtggagtgaaaatccggcccggcacggtgataagctacatcgtcctaaagggctctggaaggataggcgacagggcgattccagctgatgagttcgacccgacgaagcaccgctacgatgcggaatactacatcgagaaccaggttctcccggcggtggagaggattctaaaagccttcggctatcggaaggaggatttgcgctaccagaagacgaagcaggtcggctcgggcgcgtggctgaaggtgaaggggaagaagggtaccgaagcttacgtagaacaaaaactcatctcagaagaggatctgaatagcgccgtcgaccatcatcatcatcatcattga

SEQ ID NO: 544 - protein, 802 aa, Artificial Sequence
  Description of Artificial Sequence:Thermococcus species 9degreesN-7 mutant DNA polymerase, 9degreesN mutant
MILDTDYITENGKPVIRVFKKENGEFKIEYDRTFEPYFYALLKDDSAIEDVKKVTAKRHGTVVKVKRAEKVQKKFLGRPIEVWKLYFNHPQDVPAIRDRIRAHPAVVDIYEYDIPFAKRYLIDKGLIPMEGDEELTMLAFAIATLYHEGEEFGTGPILMISYADGSEARVITWKKIDLPYVDVVSTEKEMIKRFLRVVREKDPDVLITYNGDNFDFAYLKKRCEELGIKFTLGRDGSEPKIQRMGDRFAVEVKGRIHFDLYPVIRRTINLPTYTLEAVYEAVFGKPKEKVYAEEIAQAWESGEGLERVARYSMEDAKVTYELGREFFPMEATLSRLIGQSLWDVSRSSTGNLVEAFLLRKAYKRNELAPNKPDERELARRRGGYAGGYVKEPERGLWDNIVYLDFRSWYPSIIITHNVSPDTLNREGCKEYDVAPEVGHKFCKDFPGFIPSLLGDLLEERSKIERKMKATVDPLEKKLLVYRQWLIKILANSFYGYYGYAKARWYCKECAESVTAWGREYIEMVIRELEEKFGFKVLYADTDGLHATIPGADAETVKKKAKEFLKYINPKLPGLLELEYEGFYVRGFFVTKKKYAVIDEEGKITTRGLEIVRRDWSEIAKETQARVLEAILKHGDVEEAVRIVKEVTEKLSKYEVPPEKLVIHEQITRDLRDYKATGPHVAVAKRLAARGVKIRPGTVISYIVLKGSGRIGDRAIPADEFDPTKHRYDAEYYIENQVLPAVERILKAFGYRKEDLRYQKTKQVGSGAWLKVKGKKGTEAYVEQKLISEEDLNSAVDHHHHHH

SEQ ID NO: 545 - DNA, 2409 bp, Artificial Sequence
  Description of Artificial Sequence:Thermococcus species 9degreesN-7 mutant DNA polymerase, 9degreesN mutant
atgattctcgataccgactacatcaccgagaacgggaagcccgtgataagggtcttcaagaaggagaacggcgagtttaaaatcgagtacgacagaaccttcgagccctacttctacgcccttctgaaggacgattctgcgatagaggacgtcaagaaggtaaccgcaaagaggcacggaacggttgtcaaggtgaagcgcgccgagaaggtgcagaagaagttcctcggcaggccgatagaggtctggaagctctacttcaaccatcctcaggacgtcccggcgattcgagacaggatacgcgcccaccccgctgtcgttgacatctacgagtacgacatacccttcgccaagcgctacctcatcgacaagggcctgattccgatggagggcgacgaggagcttacgatgctcgccttcgcgatcgcaaccctctatcacgagggcgaggagttcggaaccgggccgattctcatgataagctacgccgacgggagcgaggcgagggtgataacctggaagaagattgaccttccgtacgttgacgtcgtctcgaccgagaaggagatgattaagcgcttcctccgcgtcgtcagggagaaggaccccgacgtgctcatcacctacaacggcgacaacttcgacttcgcctacctgaagaagcgctgtgaggaactcggaataaagttcacactcggcagggacgggagcgagccgaagatacagcgaatgggcgaccgctttgccgttgaggtgaagggcaggattcacttcgacctctaccccgtcataaggcgcacgataaacctcccgacctacacccttgaggccgtttacgaggccgtctttggaaagcccaaggagaaggtttacgcagaggagatagcgcaggcctgggagagcggggagggccttgaaagggttgcaagatactcgatggaggacgctaaggtgacctacgagctgggaagggagttcttcccgatggaggcccccctttcgaggcttataggccagagcctctgggacgtctcgcgctcgagcaccggaaatttggtggaggcattcctcctgcggaaggcctacaagaggaacgagctcgccccaaacaagcccgacgagagggagctcgcgagacggcgcgggggctacgctggcgggtacgttaaggaaccagagcggggattgtgggacaacattgtgtatttagacttccgctcgtggtatccttcaatcatcataacccacaacgtctcgccggataccctcaaccgcgagggctgtaaagagtacgacgtcgcccctgaggttggacacaagttctgcaaggacttccccggcttcataccaagcctcctgggagatttgctcgaggagaggagcaagatagagcggaagatgaaggcaacggttgacccgctggagaagaaactcctcgtgtacaggcagtggcttataaaaatcctcgccaacagcttctacggctactacggctacgccaaggcccggtggtactgcaaggagtgcgccgagagcgttacggcctggggaagggagtatatagaaatggttatccgggaactcgaagaaaaattcggttttaaagttctctatgccgatacagacggtctccatgctaccattcccggagcagacgctgaaacagtcaagaaaaaagcaaaggagttcttaaaatacattaatccaaaactgcccggcctgctcgaacttgagtacgagggcttctacgtgaggggcttcttcgtcacgaagaagaagtacgctgtgatagacgaggagggcaagataaccacgaggggtcttgagattgtgaggcgcgactggagcgagatagcgaaggagacccaggccagggtcttagaggcgatactcaagcacggtgacgtcgaggaggccgttaggatagtcaaggaagtgacggaaaagctgagcaagtatgaggtcccgcccgagaagctggtaatccacgagcagataacgcgcgatttgagggattacaaagccaccggcccgcacgttgccgttgcgaagaggctcgcggcgcgtggagtgaaaatccggcccggcacggtgataagctacatcgtcctaaagggctctggaaggataggcgacagggcgattccagctgatgagttcgacccgacgaagcaccgctacgatgcggaatactacatcgagaaccaggttctcccggcggtggagaggattctaaaagccttcggctatcggaaggaggatttgcgctaccagaagacgaagcaggtcggctcgggcgcgtggctgaaggtgaaggggaagaagggtaccgaagcttacgtagaacaaaaactcatctcagaagaggatctgaatagcgccgtcgaccatcatcatcatcatcattga

SEQ ID NO: 546 - protein, 802 aa, Artificial Sequence
  Description of Artificial Sequence:Thermococcus species 9degreesN-7 mutant DNA polymerase, 9degreesN mutant
MILDTDYITENGKPVIRVFKKENGEFKIEYDRTFEPYFYALLKDDSAIEDVKKVTAKRHGTVVKVKRAEKVQKKFLGRPIEVWKLYFNHPQDVPAIRDRIRAHPAVVDIYEYDIPFAKRYLIDKGLIPMEGDEELTMLAFAIATLYHEGEEFGTGPILMISYADGSEARVITWKKIDLPYVDVVSTEKEMIKRFLRVVREKDPDVLITYNGDNFDFAYLKKRCEELGIKFTLGRDGSEPKIQRMGDRFAVEVKGRIHFDLYPVIRRTINLPTYTLEAVYEAVFGKPKEKVYAEEIAQAWESGEGLERVARYSMEDAKVTYELGREFFPMEAPLSRLIGQSLWDVSRSSTGNLVEAFLLRKAYKRNELAPNKPDERELARRRGGYAGGYVKEPERGLWDNIVYLDFRSWYPSIIITHNVSPDTLNREGCKEYDVAPEVGHKFCKDFPGFIPSLLGDLLEERSKIERKMKATVDPLEKKLLVYRQWLIKILANSFYGYYGYAKARWYCKECAESVTAWGREYIEMVIRELEEKFGFKVLYADTDGLHATIPGADAETVKKKAKEFLKYINPKLPGLLELEYEGFYVRGFFVTKKKYAVIDEEGKITTRGLEIVRRDWSEIAKETQARVLEAILKHGDVEEAVRIVKEVTEKLSKYEVPPEKLVIHEQITRDLRDYKATGPHVAVAKRLAARGVKIRPGTVISYIVLKGSGRIGDRAIPADEFDPTKHRYDAEYYIENQVLPAVERILKAFGYRKEDLRYQKTKQVGSGAWLKVKGKKGTEAYVEQKLISEEDLNSAVDHHHHHH

SEQ ID NO: 547 - DNA, 2409 bp, Artificial Sequence
  Description of Artificial Sequence:Thermococcus species 9degreesN-7 mutant DNA polymerase, 9degreesN mutant
atgattctcgataccgactacatcaccgagaacgggaagcccgtgataagggtcttcaagaaggagaacggcgagtttaaaatcgagtacgacagaaccttcgagccctacttctacgcccttctgaaggacgattctgcgatagaggacgtcaagaaggtaaccgcaaagaggcacggaacggttgtcaaggtgaagcgcgccgagaaggtgcagaagaagttcctcggcaggccgatagaggtctggaagctctacttcaaccatcctcaggacgtcccggcgattcgagacaggatacgcgcccaccccgctgtcgttgacatctacgagtacgacatacccttcgccaagcgctacctcatcgacaagggcctgattccgatggagggcgacgaggagcttacgatgctcgccttcgcgatcgcaaccctctatcacgagggcgaggagttcggaaccgggccgattctcatgataagctacgccgacgggagcgaggcgagggtgataacctggaagaagattgaccttccgtacgttgacgtcgtctcgaccgagaaggagatgattaagcgcttcctccgcgtcgtcagggagaaggaccccgacgtgctcatcacctacaacggcgacaacttcgacttcgcctacctgaagaagcgctgtgaggaactcggaataaagttcacactcggcagggacgggagcgagccgaagatacagcgaatgggcgaccgctttgccgttgaggtgaagggcaggattcacttcgacctctaccccgtcataaggcgcacgataaacctcccgacctacacccttgaggccgtttacgaggccgtctttggaaagcccaaggagaaggtttacgcagaggagatagcgcaggcctgggagagcggggagggccttgaaagggttgcaagatactcgatggaggacgctaaggtgacctacgagctgggaagggagttcttcccgatggaggcccttctttcgaggcttataggccagagcctctgggacgtctcgcgctcgagcaccggaaatttggtggaggcattcctcctgcggaaggcctacaagaggaacgagctcgccccaaacaagcccgacgagagggagctcgcgagacggcgcgggggctacgctggcgggtacgttaaggaaccagagcggggattgtgggacaacattgtgtatttagacttccgctcgtggtatccttcaatcatcataacccacaacgtctcgccggataccctcaaccgcgagggctgtaaagagtacgacgtcgcccctgaggttggacacaagttctgcaaggacttccccggcttcataccaagcctcctgggagatttgctcgaggagaggagcaagatagagcggaagatgaaggcaacggttgacccgctggagaagaaactcctcgtgtacaggcagtggcttataaaaatcctcgccaacagcttctacggctactacggctacgccaaggcccggtggtactgcaaggagtgcgccgagagcgttacggcctggggaagggagtatatagaaatggttatccgggaactcgaagaaaaattcggttttaaagttctctatgccgatacagacggtctccatgctaccattcccggagcagacgctgaaacagtcaagaaaaaagcaaaggagttcttaaaatacattaatccaaaactgcccggcctgctcgaacttgagtacgagggcttctacgtgaggggcttcttcgtcacgaagaagaagtacgctgtgatagacgaggagggcaagataaccacgaggggtcttgagattgtgaggcgcgactggagcgagatagcgaaggagacccaggccagggtcttagaggcgatactcaagcacggtgacgtcgaggaggccgttaggatagtcaaggaagtgacggaaaagctgagcaagtatgaggtcccgcccgagaagctggtaatccacgagcagataacgcgcgatttgagggattacaaagccaccggcccgcacgttgccgttgcgaagaggctcgcggcgcgtggagtgaaaatccggcccggcacggtgataagctacatcgtcctaaagggctctggaaggataggcgacagggcgattccagctgatgagttcgacccgacgaagcaccgctacgatgcggaatactacatcgagaaccaggttctcccggcggtggagaggattctaaaagccttcggctatcggaaggaggatttgcgctaccagaagacgaagcaggtcggctcgggcgcgtggctgaaggtgaaggggaagaagggtaccgaagcttacgtagaacaaaaactcatctcagaagaggatctgaatagcgccgtcgaccatcatcatcatcatcattga

SEQ ID NO: 548 - protein, 802 aa, Artificial Sequence
  Description of Artificial Sequence:Thermococcus species 9degreesN-7 mutant DNA polymerase, 9degreesN mutant
MILDTDYITENGKPVIRVFKKENGEFKIEYDRTFEPYFYALLKDDSAIEDVKKVTAKRHGTVVKVKRAEKVQKKFLGRPIEVWKLYFNHPQDVPAIRDRIRAHPAVVDIYEYDIPFAKRYLIDKGLIPMEGDEELTMLAFAIATLYHEGEEFGTGPILMISYADGSEARVITWKKIDLPYVDVVSTEKEMIKRFLRVVREKDPDVLITYNGDNFDFAYLKKRCEELGIKFTLGRDGSEPKIQRMGDRFAVEVKGRIHFDLYPVIRRTINLPTYTLEAVYEAVFGKPKEKVYAEEIAQAWESGEGLERVARYSMEDAKVTYELGREFFPMEALLSRLIGQSLWDVSRSSTGNLVEAFLLRKAYKRNELAPNKPDERELARRRGGYAGGYVKEPERGLWDNIVYLDFRSWYPSIIITHNVSPDTLNREGCKEYDVAPEVGHKFCKDFPGFIPSLLGDLLEERSKIERKMKATVDPLEKKLLVYRQWLIKILANSFYGYYGYAKARWYCKECAESVTAWGREYIEMVIRELEEKFGFKVLYADTDGLHATIPGADAETVKKKAKEFLKYINPKLPGLLELEYEGFYVRGFFVTKKKYAVIDEEGKITTRGLEIVRRDWSEIAKETQARVLEAILKHGDVEEAVRIVKEVTEKLSKYEVPPEKLVIHEQITRDLRDYKATGPHVAVAKRLAARGVKIRPGTVISYIVLKGSGRIGDRAIPADEFDPTKHRYDAEYYIENQVLPAVERILKAFGYRKEDLRYQKTKQVGSGAWLKVKGKKGTEAYVEQKLISEEDLNSAVDHHHHHH

SEQ ID NO: 549 - DNA, 2409 bp, Artificial Sequence
  Description of Artificial Sequence:Thermococcus species 9degreesN-7 mutant DNA polymerase, 9degreesN mutant
atgattctcgataccgactacatcaccgagaacgggaagcccgtgataagggtcttcaagaaggagaacggcgagtttaaaatcgagtacgacagaaccttcgagccctacttctacgcccttctgaaggacgattctgcgatagaggacgtcaagaaggtaaccgcaaagaggcacggaacggttgtcaaggtgaagcgcgccgagaaggtgcagaagaagttcctcggcaggccgatagaggtctggaagctctacttcaaccatcctcaggacgtcccggcgattcgagacaggatacgcgcccaccccgctgtcgttgacatctacgagtacgacatacccttcgccaagcgctacctcatcgacaagggcctgattccgatggagggcgacgaggagcttacgatgctcgccttcgcgatcgcaaccctctatcacgagggcgaggagttcggaaccgggccgattctcatgataagctacgccgacgggagcgaggcgagggtgataacctggaagaagattgaccttccgtacgttgacgtcgtctcgaccgagaaggagatgattaagcgcttcctccgcgtcgtcagggagaaggaccccgacgtgctcatcacctacaacggcgacaacttcgacttcgcctacctgaagaagcgctgtgaggaactcggaataaagttcacactcggcagggacgggagcgagccgaagatacagcgaatgggcgaccgctttgccgttgaggtgaagggcaggattcacttcgacctctaccccgtcataaggcgcacgataaacctcccgacctacacccttgaggccgtttacgaggccgtctttggaaagcccaaggagaaggtttacgcagaggagatagcgcaggcctgggagagcggggagggccttgaaagggttgcaagatactcgatggaggacgctaaggtgacctacgagctgggaagggagttcttcccgatggaggcccagctttcgaggcttataggccagagcctctgggacgtctcgcgctcgagcaccggaaatttggtggaggcattcctcctgcggaaggcctacaagaggaacgagctcgccccaaacaagcccgacgagagggagctcgcgagacggcgcgggggctacgctggcgggtacgttaaggaaccagagcggggattgtgggacaacattgtgtatttagacttccgctcgtggtatccttcaatcatcataacccacaacgtctcgccggataccctcaaccgcgagggctgtaaagagtacgacgtcgcccctgaggttggacacaagttctgcaaggacttccccggcttcataccaagcctcctgggagatttgctcgaggagcaaagcaagatagagcggaagatgaaggcaacggttgacccgctggagaagaaactcctcgtgtacaggcagtggcttataaaaatcctcgccaacagcttctacggctactacggctacgccaaggcccggtggtactgcaaggagtgcgccgagagcgttacggcctggggaagggagtatatagaaatggttatccgggaactcgaagaaaaattcggttttaaagttctctatgccgatacagacggtctccatgctaccattcccggagcagacgctgaaacagtcaagaaaaaagcaaaggagttcttaaaatacattaatccaaaactgcccggcctgctcgaacttgagtacgagggcttctacgtgaggggcttcttcgtcacgaagaagaagtacgctgtgatagacgaggagggcaagataaccacgaggggtcttgagattgtgaggcgcgactggagcgagatagcgaaggagacccaggccagggtcttagaggcgatactcaagcacggtgacgtcgaggaggccgttaggatagtcaaggaagtgacggaaaagctgagcaagtatgaggtcccgcccgagaagctggtaatccacgagcagataacgcgcgatttgagggattacaaagccaccggcccgcacgttgccgttgcgaagaggctcgcggcgcgtggagtgaaaatccggcccggcacggtgataagctacatcgtcctaaagggctctggaaggataggcgacagggcgattccagctgatgagttcgacccgacgaagcaccgctacgatgcggaatactacatcgagaaccaggttctcccggcggtggagaggattctaaaagccttcggctatcggaaggaggatttgcgctaccagaagacgaagcaggtcggctcgggcgcgtggctgaaggtgaaggggaagaagggtaccgaagcttacgtagaacaaaaactcatctcagaagaggatctgaatagcgccgtcgaccatcatcatcatcatcattga

SEQ ID NO: 550 - protein, 802 aa, Artificial Sequence
  Description of Artificial Sequence:Thermococcus species 9degreesN-7 mutant DNA polymerase, 9degreesN mutant
MILDTDYITENGKPVIRVFKKENGEFKIEYDRTFEPYFYALLKDDSAIEDVKKVTAKRHGTVVKVKRAEKVQKKFLGRPIEVWKLYFNHPQDVPAIRDRIRAHPAVVDIYEYDIPFAKRYLIDKGLIPMEGDEELTMLAFAIATLYHEGEEFGTGPILMISYADGSEARVITWKKIDLPYVDVVSTEKEMIKRFLRVVREKDPDVLITYNGDNFDFAYLKKRCEELGIKFTLGRDGSEPKIQRMGDRFAVEVKGRIHFDLYPVIRRTINLPTYTLEAVYEAVFGKPKEKVYAEEIAQAWESGEGLERVARYSMEDAKVTYELGREFFPMEAQLSRLIGQSLWDVSRSSTGNLVEAFLLRKAYKRNELAPNKPDERELARRRGGYAGGYVKEPERGLWDNIVYLDFRSWYPSIIITHNVSPDTLNREGCKEYDVAPEVGHKFCKDFPGFIPSLLGDLLEEQSKIERKMKATVDPLEKKLLVYRQWLIKILANSFYGYYGYAKARWYCKECAESVTAWGREYIEMVIRELEEKFGFKVLYADTDGLHATIPGADAETVKKKAKEFLKYINPKLPGLLELEYEGFYVRGFFVTKKKYAVIDEEGKITTRGLEIVRRDWSEIAKETQARVLEAILKHGDVEEAVRIVKEVTEKLSKYEVPPEKLVIHEQITRDLRDYKATGPHVAVAKRLAARGVKIRPGTVISYIVLKGSGRIGDRAIPADEFDPTKHRYDAEYYIENQVLPAVERILKAFGYRKEDLRYQKTKQVGSGAWLKVKGKKGTEAYVEQKLISEEDLNSAVDHHHHHH

SEQ ID NO: 551 - DNA, 2409 bp, Artificial Sequence
  Description of Artificial Sequence:Thermococcus species 9degreesN-7 mutant DNA polymerase, 9degreesN mutant
atgattctcgataccgactacatcaccgagaacgggaagcccgtgataagggtcttcaagaaggagaacggcgagtttaaaatcgagtacgacagaaccttcgagccctacttctacgcccttctgaaggacgattctgcgatagaggacgtcaagaaggtaaccgcaaagaggcacggaacggttgtcaaggtgaagcgcgccgagaaggtgcagaagaagttcctcggcaggccgatagaggtctggaagctctacttcaaccatcctcaggacgtcccggcgattcgagacaggatacgcgcccaccccgctgtcgttgacatctacgagtacgacatacccttcgccaagcgctacctcatcgacaagggcctgattccgatggagggcgacgaggagcttacgatgctcgccttcgcgatcgcaaccctctatcacgagggcgaggagttcggaaccgggccgattctcatgataagctacgccgacgggagcgaggcgagggtgataacctggaagaagattgaccttccgtacgttgacgtcgtctcgaccgagaaggagatgattaagcgcttcctccgcgtcgtcagggagaaggaccccgacgtgctcatcacctacaacggcgacaacttcgacttcgcctacctgaagaagcgctgtgaggaactcggaataaagttcacactcggcagggacgggagcgagccgaagatacagcgaatgggcgaccgctttgccgttgaggtgaagggcaggattcacttcgacctctaccccgtcataaggcgcacgataaacctcccgacctacacccttgaggccgtttacgaggccgtctttggaaagcccaaggagaaggtttacgcagaggagatagcgcaggcctgggagagcggggagggccttgaaagggttgcaagatactcgatggaggacgctaaggtgacctacgagctgggaagggagttcttcccgatggaggcccagctttcgaggcttataggccagagcctctgggacgtctcgcgctcgagcaccggaaatttggtggaggcattcctcctgcggaaggcctacaagaggaacgagctcgccccaaacaagcccgacgagagggagctcgcgagacggcgcgggggctacgctggcgggtacgttaaggaaccagagcggggattgtgggacaacattgtgtatttagacttccgctcgtggtatccttcaatcatcataacccacaacgtctcgccggataccctcaaccgcgagggctgtaaagagtacgacgtcgcccctgaggttggacacaagttctgcaaggacttccccggcttcataccaagcctcctgggagatttgctcgaggaggtgagcaagatagagcggaagatgaaggcaacggttgacccgctggagaagaaactcctcgtgtacaggcagtggcttataaaaatcctcgccaacagcttctacggctactacggctacgccaaggcccggtggtactgcaaggagtgcgccgagagcgttacggcctggggaagggagtatatagaaatggttatccgggaactcgaagaaaaattcggttttaaagttctctatgccgatacagacggtctccatgctaccattcccggagcagacgctgaaacagtcaagaaaaaagcaaaggagttcttaaaatacattaatccaaaactgcccggcctgctcgaacttgagtacgagggcttctacgtgaggggcttcttcgtcacgaagaagaagtacgctgtgatagacgaggagggcaagataaccacgaggggtcttgagattgtgaggcgcgactggagcgagatagcgaaggagacccaggccagggtcttagaggcgatactcaagcacggtgacgtcgaggaggccgttaggatagtcaaggaagtgacggaaaagctgagcaagtatgaggtcccgcccgagaagctggtaatccacgagcagataacgcgcgatttgagggattacaaagccaccggcccgcacgttgccgttgcgaagaggctcgcggcgcgtggagtgaaaatccggcccggcacggtgataagctacatcgtcctaaagggctctggaaggataggcgacagggcgattccagctgatgagttcgacccgacgaagcaccgctacgatgcggaatactacatcgagaaccaggttctcccggcggtggagaggattctaaaagccttcggctatcggaaggaggatttgcgctaccagaagacgaagcaggtcggctcgggcgcgtggctgaaggtgaaggggaagaagggtaccgaagcttacgtagaacaaaaactcatctcagaagaggatctgaatagcgccgtcgaccatcatcatcatcatcattga

SEQ ID NO: 552 - protein, 802 aa, Artificial Sequence
  Description of Artificial Sequence:Thermococcus species 9degreesN-7 mutant DNA polymerase, 9degreesN mutant
MILDTDYITENGKPVIRVFKKENGEFKIEYDRTFEPYFYALLKDDSAIEDVKKVTAKRHGTVVKVKRAEKVQKKFLGRPIEVWKLYFNHPQDVPAIRDRIRAHPAVVDIYEYDIPFAKRYLIDKGLIPMEGDEELTMLAFAIATLYHEGEEFGTGPILMISYADGSEARVITWKKIDLPYVDVVSTEKEMIKRFLRVVREKDPDVLITYNGDNFDFAYLKKRCEELGIKFTLGRDGSEPKIQRMGDRFAVEVKGRIHFDLYPVIRRTINLPTYTLEAVYEAVFGKPKEKVYAEEIAQAWESGEGLERVARYSMEDAKVTYELGREFFPMEAQLSRLIGQSLWDVSRSSTGNLVEAFLLRKAYKRNELAPNKPDERELARRRGGYAGGYVKEPERGLWDNIVYLDFRSWYPSIIITHNVSPDTLNREGCKEYDVAPEVGHKFCKDFPGFIPSLLGDLLEEVSKIERKMKATVDPLEKKLLVYRQWLIKILANSFYGYYGYAKARWYCKECAESVTAWGREYIEMVIRELEEKFGFKVLYADTDGLHATIPGADAETVKKKAKEFLKYINPKLPGLLELEYEGFYVRGFFVTKKKYAVIDEEGKITTRGLEIVRRDWSEIAKETQARVLEAILKHGDVEEAVRIVKEVTEKLSKYEVPPEKLVIHEQITRDLRDYKATGPHVAVAKRLAARGVKIRPGTVISYIVLKGSGRIGDRAIPADEFDPTKHRYDAEYYIENQVLPAVERILKAFGYRKEDLRYQKTKQVGSGAWLKVKGKKGTEAYVEQKLISEEDLNSAVDHHHHHH

SEQ ID NO: 553 - DNA, 2409 bp, Artificial Sequence
  Description of Artificial Sequence:Thermococcus species 9degreesN-7 mutant DNA polymerase, 9degreesN mutant
atgattctcgataccgactacatcaccgagaacgggaagcccgtgataagggtcttcaagaaggagaacggcgagtttaaaatcgagtacgacagaaccttcgagccctacttctacgcccttctgaaggacgattctgcgatagaggacgtcaagaaggtaaccgcaaagaggcacggaacggttgtcaaggtgaagcgcgccgagaaggtgcagaagaagttcctcggcaggccgatagaggtctggaagctctacttcaaccatcctcaggacgtcccggcgattcgagacaggatacgcgcccaccccgctgtcgttgacatctacgagtacgacatacccttcgccaagcgctacctcatcgacaagggcctgattccgatggagggcgacgaggagcttacgatgctcgccttcgcgatcgcaaccctctatcacgagggcgaggagttcggaaccgggccgattctcatgataagctacgccgacgggagcgaggcgagggtgataacctggaagaagattgaccttccgtacgttgacgtcgtctcgaccgagaaggagatgattaagcgcttcctccgcgtcgtcagggagaaggaccccgacgtgctcatcacctacaacggcgacaacttcgacttcgcctacctgaagaagcgctgtgaggaactcggaataaagttcacactcggcagggacgggagcgagccgaagatacagcgaatgggcgaccgctttgccgttgaggtgaagggcaggattcacttcgacctctaccccgtcataaggcgcacgataaacctcccgacctacacccttgaggccgtttacgaggccgtctttggaaagcccaaggagaaggtttacgcagaggagatagcgcaggcctgggagagcggggagggccttgaaagggttgcaagatactcgatggaggacgctaaggtgacctacgagctgggaagggagttcttcccgatggaggcccagctttcgaggcttataggccagagcctctgggacgtctcgcgctcgagcaccggaaatttggtggaggcattcctcctgcggaaggcctacaagaggaacgagctcgccccaaacaagcccgacgagagggagctcgcgagacggcgcgggggctacgctggcgggtacgttaaggaaccagagcggggattgtgggacaacattgtgtatttagacttccgctcgtggtatccttcaatcatcataacccacaacgtctcgccggataccctcaaccgcgagggctgtaaagagtacgacgtcgcccctgaggttggacacaagttctgcaaggacttccccggcttcataccaagcctcctgggagatttgctcgaggagggcagcaagatagagcggaagatgaaggcaacggttgacccgctggagaagaaactcctcgtgtacaggcagtggcttataaaaatcctcgccaacagcttctacggctactacggctacgccaaggcccggtggtactgcaaggagtgcgccgagagcgttacggcctggggaagggagtatatagaaatggttatccgggaactcgaagaaaaattcggttttaaagttctctatgccgatacagacggtctccatgctaccattcccggagcagacgctgaaacagtcaagaaaaaagcaaaggagttcttaaaatacattaatccaaaactgcccggcctgctcgaacttgagtacgagggcttctacgtgaggggcttcttcgtcacgaagaagaagtacgctgtgatagacgaggagggcaagataaccacgaggggtcttgagattgtgaggcgcgactggagcgagatagcgaaggagacccaggccagggtcttagaggcgatactcaagcacggtgacgtcgaggaggccgttaggatagtcaaggaagtgacggaaaagctgagcaagtatgaggtcccgcccgagaagctggtaatccacgagcagataacgcgcgatttgagggattacaaagccaccggcccgcacgttgccgttgcgaagaggctcgcggcgcgtggagtgaaaatccggcccggcacggtgataagctacatcgtcctaaagggctctggaaggataggcgacagggcgattccagctgatgagttcgacccgacgaagcaccgctacgatgcggaatactacatcgagaaccaggttctcccggcggtggagaggattctaaaagccttcggctatcggaaggaggatttgcgctaccagaagacgaagcaggtcggctcgggcgcgtggctgaaggtgaaggggaagaagggtaccgaagcttacgtagaacaaaaactcatctcagaagaggatctgaatagcgccgtcgaccatcatcatcatcatcattga

SEQ ID NO: 554 - protein, 802 aa, Artificial Sequence
  Description of Artificial Sequence:Thermococcus species 9degreesN-7 mutant DNA polymerase, 9degreesN mutant
MILDTDYITENGKPVIRVFKKENGEFKIEYDRTFEPYFYALLKDDSAIEDVKKVTAKRHGTVVKVKRAEKVQKKFLGRPIEVWKLYFNHPQDVPAIRDRIRAHPAVVDIYEYDIPFAKRYLIDKGLIPMEGDEELTMLAFAIATLYHEGEEFGTGPILMISYADGSEARVITWKKIDLPYVDVVSTEKEMIKRFLRVVREKDPDVLITYNGDNFDFAYLKKRCEELGIKFTLGRDGSEPKIQRMGDRFAVEVKGRIHFDLYPVIRRTINLPTYTLEAVYEAVFGKPKEKVYAEEIAQAWESGEGLERVARYSMEDAKVTYELGREFFPMEAQLSRLIGQSLWDVSRSSTGNLVEAFLLRKAYKRNELAPNKPDERELARRRGGYAGGYVKEPERGLWDNIVYLDFRSWYPSIIITHNVSPDTLNREGCKEYDVAPEVGHKFCKDFPGFIPSLLGDLLEEGSKIERKMKATVDPLEKKLLVYRQWLIKILANSFYGYYGYAKARWYCKECAESVTAWGREYIEMVIRELEEKFGFKVLYADTDGLHATIPGADAETVKKKAKEFLKYINPKLPGLLELEYEGFYVRGFFVTKKKYAVIDEEGKITTRGLEIVRRDWSEIAKETQARVLEAILKHGDVEEAVRIVKEVTEKLSKYEVPPEKLVIHEQITRDLRDYKATGPHVAVAKRLAARGVKIRPGTVISYIVLKGSGRIGDRAIPADEFDPTKHRYDAEYYIENQVLPAVERILKAFGYRKEDLRYQKTKQVGSGAWLKVKGKKGTEAYVEQKLISEEDLNSAVDHHHHHH

SEQ ID NO: 555 - DNA, 2409 bp, Artificial Sequence
  Description of Artificial Sequence:Thermococcus species 9degreesN-7 mutant DNA polymerase, 9degreesN mutant
atgattctcgataccgactacatcaccgagaacgggaagcccgtgataagggtcttcaagaaggagaacggcgagtttaaaatcgagtacgacagaaccttcgagccctacttctacgcccttctgaaggacgattctgcgatagaggacgtcaagaaggtaaccgcaaagaggcacggaacggttgtcaaggtgaagcgcgccgagaaggtgcagaagaagttcctcggcaggccgatagaggtctggaagctctacttcaaccatcctcaggacgtcccggcgattcgagacaggatacgcgcccaccccgctgtcgttgacatctacgagtacgacatacccttcgccaagcgctacctcatcgacaagggcctgattccgatggagggcgacgaggagcttacgatgctcgccttcgcgatcgcaaccctctatcacgagggcgaggagttcggaaccgggccgattctcatgataagctacgccgacgggagcgaggcgagggtgataacctggaagaagattgaccttccgtacgttgacgtcgtctcgaccgagaaggagatgattaagcgcttcctccgcgtcgtcagggagaaggaccccgacgtgctcatcacctacaacggcgacaacttcgacttcgcctacctgaagaagcgctgtgaggaactcggaataaagttcacactcggcagggacgggagcgagccgaagatacagcgaatgggcgaccgctttgccgttgaggtgaagggcaggattcacttcgacctctaccccgtcataaggcgcacgataaacctcccgacctacacccttgaggccgtttacgaggccgtctttggaaagcccaaggagaaggtttacgcagaggagatagcgcaggcctgggagagcggggagggccttgaaagggttgcaagatactcgatggaggacgctaaggtgacctacgagctgggaagggagttcttcccgatggaggcccagctttcgaggcttataggccagagcctctgggacgtctcgcgctcgagcaccggaaatttggtggaggcattcctcctgcggaaggcctacaagaggaacgagctcgccccaaacaagcccgacgagagggagctcgcgagacggcgcgggggctacgctggcgggtacgttaaggaaccagagcggggattgtgggacaacattgtgtatttagacttccgctcgtggtatccttcaatcatcataacccacaacgtctcgccggataccctcaaccgcgagggctgtaaagagtacgacgtcgcccctgaggttggacacaagttctgcaaggacttccccggcttcataccaagcctcctgggagatttgctcgaggagatgagcaagatagagcggaagatgaaggcaacggttgacccgctggagaagaaactcctcgtgtacaggcagtggcttataaaaatcctcgccaacagcttctacggctactacggctacgccaaggcccggtggtactgcaaggagtgcgccgagagcgttacggcctggggaagggagtatatagaaatggttatccgggaactcgaagaaaaattcggttttaaagttctctatgccgatacagacggtctccatgctaccattcccggagcagacgctgaaacagtcaagaaaaaagcaaaggagttcttaaaatacattaatccaaaactgcccggcctgctcgaacttgagtacgagggcttctacgtgaggggcttcttcgtcacgaagaagaagtacgctgtgatagacgaggagggcaagataaccacgaggggtcttgagattgtgaggcgcgactggagcgagatagcgaaggagacccaggccagggtcttagaggcgatactcaagcacggtgacgtcgaggaggccgttaggatagtcaaggaagtgacggaaaagctgagcaagtatgaggtcccgcccgagaagctggtaatccacgagcagataacgcgcgatttgagggattacaaagccaccggcccgcacgttgccgttgcgaagaggctcgcggcgcgtggagtgaaaatccggcccggcacggtgataagctacatcgtcctaaagggctctggaaggataggcgacagggcgattccagctgatgagttcgacccgacgaagcaccgctacgatgcggaatactacatcgagaaccaggttctcccggcggtggagaggattctaaaagccttcggctatcggaaggaggatttgcgctaccagaagacgaagcaggtcggctcgggcgcgtggctgaaggtgaaggggaagaagggtaccgaagcttacgtagaacaaaaactcatctcagaagaggatctgaatagcgccgtcgaccatcatcatcatcatcattga

SEQ ID NO: 556 - protein, 802 aa, Artificial Sequence
  Description of Artificial Sequence:Thermococcus species 9degreesN-7 mutant DNA polymerase, 9degreesN mutant
MILDTDYITENGKPVIRVFKKENGEFKIEYDRTFEPYFYALLKDDSAIEDVKKVTAKRHGTVVKVKRAEKVQKKFLGRPIEVWKLYFNHPQDVPAIRDRIRAHPAVVDIYEYDIPFAKRYLIDKGLIPMEGDEELTMLAFAIATLYHEGEEFGTGPILMISYADGSEARVITWKKIDLPYVDVVSTEKEMIKRFLRVVREKDPDVLITYNGDNFDFAYLKKRCEELGIKFTLGRDGSEPKIQRMGDRFAVEVKGRIHFDLYPVIRRTINLPTYTLEAVYEAVFGKPKEKVYAEEIAQAWESGEGLERVARYSMEDAKVTYELGREFFPMEAQLSRLIGQSLWDVSRSSTGNLVEAFLLRKAYKRNELAPNKPDERELARRRGGYAGGYVKEPERGLWDNIVYLDFRSWYPSIIITHNVSPDTLNREGCKEYDVAPEVGHKFCKDFPGFIPSLLGDLLEEMSKIERKMKATVDPLEKKLLVYRQWLIKILANSFYGYYGYAKARWYCKECAESVTAWGREYIEMVIRELEEKFGFKVLYADTDGLHATIPGADAETVKKKAKEFLKYINPKLPGLLELEYEGFYVRGFFVTKKKYAVIDEEGKITTRGLEIVRRDWSEIAKETQARVLEAILKHGDVEEAVRIVKEVTEKLSKYEVPPEKLVIHEQITRDLRDYKATGPHVAVAKRLAARGVKIRPGTVISYIVLKGSGRIGDRAIPADEFDPTKHRYDAEYYIENQVLPAVERILKAFGYRKEDLRYQKTKQVGSGAWLKVKGKKGTEAYVEQKLISEEDLNSAVDHHHHHH

SEQ ID NO: 557 - DNA, 2409 bp, Artificial Sequence
  Description of Artificial Sequence:Thermococcus species 9degreesN-7 mutant DNA polymerase, 9degreesN mutant
atgattctcgataccgactacatcaccgagaacgggaagcccgtgataagggtcttcaagaaggagaacggcgagtttaaaatcgagtacgacagaaccttcgagccctacttctacgcccttctgaaggacgattctgcgatagaggacgtcaagaaggtaaccgcaaagaggcacggaacggttgtcaaggtgaagcgcgccgagaaggtgcagaagaagttcctcggcaggccgatagaggtctggaagctctacttcaaccatcctcaggacgtcccggcgattcgagacaggatacgcgcccaccccgctgtcgttgacatctacgagtacgacatacccttcgccaagcgctacctcatcgacaagggcctgattccgatggagggcgacgaggagcttacgatgctcgccttcgcgatcgcaaccctctatcacgagggcgaggagttcggaaccgggccgattctcatgataagctacgccgacgggagcgaggcgagggtgataacctggaagaagattgaccttccgtacgttgacgtcgtctcgaccgagaaggagatgattaagcgcttcctccgcgtcgtcagggagaaggaccccgacgtgctcatcacctacaacggcgacaacttcgacttcgcctacctgaagaagcgctgtgaggaactcggaataaagttcacactcggcagggacgggagcgagccgaagatacagcgaatgggcgaccgctttgccgttgaggtgaagggcaggattcacttcgacctctaccccgtcataaggcgcacgataaacctcccgacctacacccttgaggccgtttacgaggccgtctttggaaagcccaaggagaaggtttacgcagaggagatagcgcaggcctgggagagcggggagggccttgaaagggttgcaagatactcgatggaggacgctaaggtgacctacgagctgggaagggagttcttcccgatggaggcccagctttcgaggcttataggccagagcctctgggacgtctcgcgctcgagcaccggaaatttggtggaggcattcctcctgcggaaggcctacaagaggaacgagctcgccccaaacaagcccgacgagagggagctcgcgagacggcgcgggggctacgctggcgggtacgttaaggaaccagagcggggattgtgggacaacattgtgtatttagacttccgctcgtggtatccttcaatcatcataacccacaacgtctcgccggataccctcaaccgcgagggctgtaaagagtacgacgtcgcccctgaggttggacacaagttctgcaaggacttccccggcttcataccaagcctcctgggagatttgctcgaggagaggagcaagatagagcggaagatgaaggcaacggttgacccgctggagaagaaactcctcgtgtacaggcagtggcttataaaaatcctcgccaacagcttctacggctacatgggctacgccaaggcccggtggtactgcaaggagtgcgccgagagcgttacggcctggggaagggagtatatagaaatggttatccgggaactcgaagaaaaattcggttttaaagttctctatgccgatacagacggtctccatgctaccattcccggagcagacgctgaaacagtcaagaaaaaagcaaaggagttcttaaaatacattaatccaaaactgcccggcctgctcgaacttgagtacgagggcttctacgtgaggggcttcttcgtcacgaagaagaagtacgctgtgatagacgaggagggcaagataaccacgaggggtcttgagattgtgaggcgcgactggagcgagatagcgaaggagacccaggccagggtcttagaggcgatactcaagcacggtgacgtcgaggaggccgttaggatagtcaaggaagtgacggaaaagctgagcaagtatgaggtcccgcccgagaagctggtaatccacgagcagataacgcgcgatttgagggattacaaagccaccggcccgcacgttgccgttgcgaagaggctcgcggcgcgtggagtgaaaatccggcccggcacggtgataagctacatcgtcctaaagggctctggaaggataggcgacagggcgattccagctgatgagttcgacccgacgaagcaccgctacgatgcggaatactacatcgagaaccaggttctcccggcggtggagaggattctaaaagccttcggctatcggaaggaggatttgcgctaccagaagacgaagcaggtcggctcgggcgcgtggctgaaggtgaaggggaagaagggtaccgaagcttacgtagaacaaaaactcatctcagaagaggatctgaatagcgccgtcgaccatcatcatcatcatcattga

SEQ ID NO: 558 - protein, 802 aa, Artificial Sequence
  Description of Artificial Sequence:Thermococcus species 9degreesN-7 mutant DNA polymerase, 9degreesN mutant
MILDTDYITENGKPVIRVFKKENGEFKIEYDRTFEPYFYALLKDDSAIEDVKKVTAKRHGTVVKVKRAEKVQKKFLGRPIEVWKLYFNHPQDVPAIRDRIRAHPAVVDIYEYDIPFAKRYLIDKGLIPMEGDEELTMLAFAIATLYHEGEEFGTGPILMISYADGSEARVITWKKIDLPYVDVVSTEKEMIKRFLRVVREKDPDVLITYNGDNFDFAYLKKRCEELGIKFTLGRDGSEPKIQRMGDRFAVEVKGRIHFDLYPVIRRTINLPTYTLEAVYEAVFGKPKEKVYAEEIAQAWESGEGLERVARYSMEDAKVTYELGREFFPMEAQLSRLIGQSLWDVSRSSTGNLVEAFLLRKAYKRNELAPNKPDERELARRRGGYAGGYVKEPERGLWDNIVYLDFRSWYPSIIITHNVSPDTLNREGCKEYDVAPEVGHKFCKDFPGFIPSLLGDLLEERSKIERKMKATVDPLEKKLLVYRQWLIKILANSFYGYMGYAKARWYCKECAESVTAWGREYIEMVIRELEEKFGFKVLYADTDGLHATIPGADAETVKKKAKEFLKYINPKLPGLLELEYEGFYVRGFFVTKKKYAVIDEEGKITTRGLEIVRRDWSEIAKETQARVLEAILKHGDVEEAVRIVKEVTEKLSKYEVPPEKLVIHEQITRDLRDYKATGPHVAVAKRLAARGVKIRPGTVISYIVLKGSGRIGDRAIPADEFDPTKHRYDAEYYIENQVLPAVERILKAFGYRKEDLRYQKTKQVGSGAWLKVKGKKGTEAYVEQKLISEEDLNSAVDHHHHHH

SEQ ID NO: 559 - DNA, 2409 bp, Artificial Sequence
  Description of Artificial Sequence:Thermococcus species 9degreesN-7 mutant DNA polymerase, 9degreesN mutant
atgattctcgataccgactacatcaccgagaacgggaagcccgtgataagggtcttcaagaaggagaacggcgagtttaaaatcgagtacgacagaaccttcgagccctacttctacgcccttctgaaggacgattctgcgatagaggacgtcaagaaggtaaccgcaaagaggcacggaacggttgtcaaggtgaagcgcgccgagaaggtgcagaagaagttcctcggcaggccgatagaggtctggaagctctacttcaaccatcctcaggacgtcccggcgattcgagacaggatacgcgcccaccccgctgtcgttgacatctacgagtacgacatacccttcgccaagcgctacctcatcgacaagggcctgattccgatggagggcgacgaggagcttacgatgctcgccttcgcgatcgcaaccctctatcacgagggcgaggagttcggaaccgggccgattctcatgataagctacgccgacgggagcgaggcgagggtgataacctggaagaagattgaccttccgtacgttgacgtcgtctcgaccgagaaggagatgattaagcgcttcctccgcgtcgtcagggagaaggaccccgacgtgctcatcacctacaacggcgacaacttcgacttcgcctacctgaagaagcgctgtgaggaactcggaataaagttcacactcggcagggacgggagcgagccgaagatacagcgaatgggcgaccgctttgccgttgaggtgaagggcaggattcacttcgacctctaccccgtcataaggcgcacgataaacctcccgacctacacccttgaggccgtttacgaggccgtctttggaaagcccaaggagaaggtttacgcagaggagatagcgcaggcctgggagagcggggagggccttgaaagggttgcaagatactcgatggaggacgctaaggtgacctacgagctgggaagggagttcttcccgatggaggcccagctttcgaggcttataggccagagcctctgggacgtctcgcgctcgagcaccggaaatttggtggaggcattcctcctgcggaaggcctacaagaggaacgagctcgccccaaacaagcccgacgagagggagctcgcgagacggcgcgggggctacgctggcgggtacgttaaggaaccagagcggggattgtgggacaacattgtgtatttagacttccgctcgtggtatccttcaatcatcataacccacaacgtctcgccggataccctcaaccgcgagggctgtaaagagtacgacgtcgcccctgaggttggacacaagttctgcaaggacttccccggcttcataccaagcattctgggagatttgctcgaggagaggagcaagatagagcggaagatgaaggcaacggttgacccgctggagaagaaactcctcgtgtacaggcagtggcttataaaaatcctcgccaacagcttctacggctacctaggctacgccaaggcccggtggtactgcaaggagtgcgccgagagcgttacggcctggggaagggagtatatagaaatggttatccgggaactcgaagaaaaattcggttttaaagttctctatgccgatacagacggtctccatgctaccattcccggagcagacgctgaaacagtcaagaaaaaagcaaaggagttcttaaaatacattaatccaaaactgcccggcctgctcgaacttgagtacgagggcttctacgtgaggggcttcttcgtcacgaagaagaagtacgctgtgatagacgaggagggcaagataaccacgaggggtcttgagattgtgaggcgcgactggagcgagatagcgaaggagacccaggccagggtcttagaggcgatactcaagcacggtgacgtcgaggaggccgttaggatagtcaaggaagtgacggaaaagctgagcaagtatgaggtcccgcccgagaagctggtaatccacgagcagataacgcgcgatttgagggattacaaagccaccggcccgcacgttgccgttgcgaagaggctcgcggcgcgtggagtgaaaatccggcccggcacggtgataagctacatcgtcctaaagggctctggaaggataggcgacagggcgattccagctgatgagttcgacccgacgaagcaccgctacgatgcggaatactacatcgagaaccaggttctcccggcggtggagaggattctaaaagccttcggctatcggaaggaggatttgcgctaccagaagacgaagcaggtcggctcgggcgcgtggctgaaggtgaaggggaagaagggtaccgaagcttacgtagaacaaaaactcatctcagaagaggatctgaatagcgccgtcgaccatcatcatcatcatcattga

SEQ ID NO: 560 - protein, 802 aa, Artificial Sequence
  Description of Artificial Sequence:Thermococcus species 9degreesN-7 mutant DNA polymerase, 9degreesN mutant
MILDTDYITENGKPVIRVFKKENGEFKIEYDRTFEPYFYALLKDDSAIEDVKKVTAKRHGTVVKVKRAEKVQKKFLGRPIEVWKLYFNHPQDVPAIRDRIRAHPAVVDIYEYDIPFAKRYLIDKGLIPMEGDEELTMLAFAIATLYHEGEEFGTGPILMISYADGSEARVITWKKIDLPYVDVVSTEKEMIKRFLRVVREKDPDVLITYNGDNFDFAYLKKRCEELGIKFTLGRDGSEPKIQRMGDRFAVEVKGRIHFDLYPVIRRTINLPTYTLEAVYEAVFGKPKEKVYAEEIAQAWESGEGLERVARYSMEDAKVTYELGREFFPMEAQLSRLIGQSLWDVSRSSTGNLVEAFLLRKAYKRNELAPNKPDERELARRRGGYAGGYVKEPERGLWDNIVYLDFRSWYPSIIITHNVSPDTLNREGCKEYDVAPEVGHKFCKDFPGFIPSILGDLLEERSKIERKMKATVDPLEKKLLVYRQWLIKILANSFYGYLGYAKARWYCKECAESVTAWGREYIEMVIRELEEKFGFKVLYADTDGLHATIPGADAETVKKKAKEFLKYINPKLPGLLELEYEGFYVRGFFVTKKKYAVIDEEGKITTRGLEIVRRDWSEIAKETQARVLEAILKHGDVEEAVRIVKEVTEKLSKYEVPPEKLVIHEQITRDLRDYKATGPHVAVAKRLAARGVKIRPGTVISYIVLKGSGRIGDRAIPADEFDPTKHRYDAEYYIENQVLPAVERILKAFGYRKEDLRYQKTKQVGSGAWLKVKGKKGTEAYVEQKLISEEDLNSAVDHHHHHH

SEQ ID NO: 561 - DNA, 2409 bp, Artificial Sequence
  Description of Artificial Sequence:Thermococcus species 9degreesN-7 mutant DNA polymerase, 9degreesN mutant
atgattctcgataccgactacatcaccgagaacgggaagcccgtgataagggtcttcaagaaggagaacggcgagtttaaaatcgagtacgacagaaccttcgagccctacttctacgcccttctgaaggacgattctgcgatagaggacgtcaagaaggtaaccgcaaagaggcacggaacggttgtcaaggtgaagcgcgccgagaaggtgcagaagaagttcctcggcaggccgatagaggtctggaagctctacttcaaccatcctcaggacgtcccggcgattcgagacaggatacgcgcccaccccgctgtcgttgacatctacgagtacgacatacccttcgccaagcgctacctcatcgacaagggcctgattccgatggagggcgacgaggagcttacgatgctcgccttcgcgatcgcaaccctctatcacgagggcgaggagttcggaaccgggccgattctcatgataagctacgccgacgggagcgaggcgagggtgataacctggaagaagattgaccttccgtacgttgacgtcgtctcgaccgagaaggagatgattaagcgcttcctccgcgtcgtcagggagaaggaccccgacgtgctcatcacctacaacggcgacaacttcgacttcgcctacctgaagaagcgctgtgaggaactcggaataaagttcacactcggcagggacgggagcgagccgaagatacagcgaatgggcgaccgctttgccgttgaggtgaagggcaggattcacttcgacctctaccccgtcataaggcgcacgataaacctcccgacctacacccttgaggccgtttacgaggccgtctttggaaagcccaaggagaaggtttacgcagaggagatagcgcaggcctgggagagcggggagggccttgaaagggttgcaagatactcgatggaggacgctaaggtgacctacgagctgggaagggagttcttcccgatggaggcccagctttcgaggcttataggccagagcctctgggacgtctcgcgctcgagcaccggaaatttggtggaggcattcctcctgcggaaggcctacaagaggaacgagctcgccccaaacaagcccgacgagagggagctcgcgagacggcgcgggggctacgctggcgggtacgttaaggaaccagagcggggattgtgggacaacattgtgtatttagacttccgctcgtggtatccttcaatcatcataacccacaacgtctcgccggataccctcaaccgcgagggctgtaaagagtacgacgtcgcccctgaggttggacacaagttctgcaaggacttccccggcttcataccaagcctcctgggagatttgctcgaggagaggagcaagatagagcggaagatgaaggcaacggttgacccgctggagaagaaactcctcgtgtacaggcagtggcttataaaaatcctcgccaacagcttctacggctacaagggctacgccaaggcccggtggtactgcaaggagtgcgccgagagcgttacggcctggggaagggagtatatagaaatggttatccgggaactcgaagaaaaattcggttttaaagttctctatgccgatacagacggtctccatgctaccattcccggagcagacgctgaaacagtcaagaaaaaagcaaaggagttcttaaaatacattaatccaaaactgcccggcctgctcgaacttgagtacgagggcttctacgtgaggggcttcttcgtcacgaagaagaagtacgctgtgatagacgaggagggcaagataaccacgaggggtcttgagattgtgaggcgcgactggagcgagatagcgaaggagacccaggccagggtcttagaggcgatactcaagcacggtgacgtcgaggaggccgttaggatagtcaaggaagtgacggaaaagctgagcaagtatgaggtcccgcccgagaagctggtaatccacgagcagataacgcgcgatttgagggattacaaagccaccggcccgcacgttgccgttgcgaagaggctcgcggcgcgtggagtgaaaatccggcccggcacggtgataagctacatcgtcctaaagggctctggaaggataggcgacagggcgattccagctgatgagttcgacccgacgaagcaccgctacgatgcggaatactacatcgagaaccaggttctcccggcggtggagaggattctaaaagccttcggctatcggaaggaggatttgcgctaccagaagacgaagcaggtcggctcgggcgcgtggctgaaggtgaaggggaagaagggtaccgaagcttacgtagaacaaaaactcatctcagaagaggatctgaatagcgccgtcgaccatcatcatcatcatcattga

SEQ ID NO: 562 - protein, 802 aa, Artificial Sequence
  Description of Artificial Sequence:Thermococcus species 9degreesN-7 mutant DNA polymerase, 9degreesN mutant
MILDTDYITENGKPVIRVFKKENGEFKIEYDRTFEPYFYALLKDDSAIEDVKKVTAKRHGTVVKVKRAEKVQKKFLGRPIEVWKLYFNHPQDVPAIRDRIRAHPAVVDIYEYDIPFAKRYLIDKGLIPMEGDEELTMLAFAIATLYHEGEEFGTGPILMISYADGSEARVITWKKIDLPYVDVVSTEKEMIKRFLRVVREKDPDVLITYNGDNFDFAYLKKRCEELGIKFTLGRDGSEPKIQRMGDRFAVEVKGRIHFDLYPVIRRTINLPTYTLEAVYEAVFGKPKEKVYAEEIAQAWESGEGLERVARYSMEDAKVTYELGREFFPMEAQLSRLIGQSLWDVSRSSTGNLVEAFLLRKAYKRNELAPNKPDERELARRRGGYAGGYVKEPERGLWDNIVYLDFRSWYPSIIITHNVSPDTLNREGCKEYDVAPEVGHKFCKDFPGFIPSLLGDLLEERSKIERKMKATVDPLEKKLLVYRQWLIKILANSFYGYKGYAKARWYCKECAESVTAWGREYIEMVIRELEEKFGFKVLYADTDGLHATIPGADAETVKKKAKEFLKYINPKLPGLLELEYEGFYVRGFFVTKKKYAVIDEEGKITTRGLEIVRRDWSEIAKETQARVLEAILKHGDVEEAVRIVKEVTEKLSKYEVPPEKLVIHEQITRDLRDYKATGPHVAVAKRLAARGVKIRPGTVISYIVLKGSGRIGDRAIPADEFDPTKHRYDAEYYIENQVLPAVERILKAFGYRKEDLRYQKTKQVGSGAWLKVKGKKGTEAYVEQKLISEEDLNSAVDHHHHHH

SEQ ID NO: 563 - DNA, 2409 bp, Artificial Sequence
  Description of Artificial Sequence:Thermococcus species 9degreesN-7 mutant DNA polymerase, 9degreesN mutant
atgattctcgataccgactacatcaccgagaacgggaagcccgtgataagggtcttcaagaaggagaacggcgagtttaaaatcgagtacgacagaaccttcgagccctacttctacgcccttctgaaggacgattctgcgatagaggacgtcaagaaggtaaccgcaaagaggcacggaacggttgtcaaggtgaagcgcgccgagaaggtgcagaagaagttcctcggcaggccgatagaggtctggaagctctacttcaaccatcctcaggacgtcccggcgattcgagacaggatacgcgcccaccccgctgtcgttgacatctacgagtacgacatacccttcgccaagcgctacctcatcgacaagggcctgattccgatggagggcgacgaggagcttacgatgctcgccttcgcgatcgcaaccctctatcacgagggcgaggagttcggaaccgggccgattctcatgataagctacgccgacgggagcgaggcgagggtgataacctggaagaagattgaccttccgtacgttgacgtcgtctcgaccgagaaggagatgattaagcgcttcctccgcgtcgtcagggagaaggaccccgacgtgctcatcacctacaacggcgacaacttcgacttcgcctacctgaagaagcgctgtgaggaactcggaataaagttcacactcggcagggacgggagcgagccgaagatacagcgaatgggcgaccgctttgccgttgaggtgaagggcaggattcacttcgacctctaccccgtcataaggcgcacgataaacctcccgacctacacccttgaggccgtttacgaggccgtctttggaaagcccaaggagaaggtttacgcagaggagatagcgcaggcctgggagagcggggagggccttgaaagggttgcaagatactcgatggaggacgctaaggtgacctacgagctgggaagggagttcttcccgatggaggcccagctttcgaggcttataggccagagcctctgggacgtctcgcgctcgagcaccggaaatttggtggaggcattcctcctgcggaaggcctacaagaggaacgagctcgccccaaacaagcccgacgagagggagctcgcgagacggcgcgggggctacgctggcgggtacgttaaggaaccagagcggggattgtgggacaacattgtgtatttagacttccgctcgtggtatccttcaatcatcataacccacaacgtctcgccggataccctcaaccgcgagggctgtaaagagtacgacgtcgcccctgaggttggacacaagttctgcaaggacttccccggcttcataccaagcctcctgggagatttgctcgaggagaggagcaagatagagcggaagatgaaggcaacggttgacccgctggagaagaaactcctcgtgtacaggcagtggcttataaaaatcctcgccaacagcttctacggctacctaggctacgccaaggcccggtggtactgcaaggagtgcgccgagagcgttacggcctggggaagggagtatatagaaatggttatccgggaactcgaagaaaaattcggttttaaagttctctatgccgatacagacggtctccatgctaccattcccggagcagacgctgaaacagtcaagaaaaaagcaaaggagttcttaaaatacattaatccaaaactgcccggcctgctcgaacttgagtacgagggcttctacgtgaggggcttcttcgtcacgaagaagaagtacgctgtgatagacgaggagggcaagataaccacgaggggtcttgagattgtgaggcgcgactggagcgagatagcgaaggagacccaggccagggtcttagaggcgatactcaagcacggtgacgtcgaggaggccgttaggatagtcaaggaagtgacggaaaagctgagcaagtatgaggtcccgcccgagaagctggtaatccacgagcagataacgcgcgatttgagggattacaaagccaccggcccgcacgttgccgttgcgaagaggctcgcggcgcgtggagtgaaaatccggcccggcacggtgataagctacatcgtcctaaagggctctggaaggataggcgacagggcgattccagctgatgagttcgacccgacgaagcaccgctacgatgcggaatactacatcgagaaccaggttctcccggcggtggagaggattctaaaagccttcggctatcggaaggaggatttgcgctaccagaagacgaagcaggtcggctcgggcgcgtggctgaaggtgaaggggaagaagggtaccgaagcttacgtagaacaaaaactcatctcagaagaggatctgaatagcgccgtcgaccatcatcatcatcatcattga

SEQ ID NO: 564 - protein, 802 aa, Artificial Sequence
  Description of Artificial Sequence:Thermococcus species 9degreesN-7 mutant DNA polymerase, 9degreesN mutant
MILDTDYITENGKPVIRVFKKENGEFKIEYDRTFEPYFYALLKDDSAIEDVKKVTAKRHGTVVKVKRAEKVQKKFLGRPIEVWKLYFNHPQDVPAIRDRIRAHPAVVDIYEYDIPFAKRYLIDKGLIPMEGDEELTMLAFAIATLYHEGEEFGTGPILMISYADGSEARVITWKKIDLPYVDVVSTEKEMIKRFLRVVREKDPDVLITYNGDNFDFAYLKKRCEELGIKFTLGRDGSEPKIQRMGDRFAVEVKGRIHFDLYPVIRRTINLPTYTLEAVYEAVFGKPKEKVYAEEIAQAWESGEGLERVARYSMEDAKVTYELGREFFPMEAQLSRLIGQSLWDVSRSSTGNLVEAFLLRKAYKRNELAPNKPDERELARRRGGYAGGYVKEPERGLWDNIVYLDFRSWYPSIIITHNVSPDTLNREGCKEYDVAPEVGHKFCKDFPGFIPSLLGDLLEERSKIERKMKATVDPLEKKLLVYRQWLIKILANSFYGYLGYAKARWYCKECAESVTAWGREYIEMVIRELEEKFGFKVLYADTDGLHATIPGADAETVKKKAKEFLKYINPKLPGLLELEYEGFYVRGFFVTKKKYAVIDEEGKITTRGLEIVRRDWSEIAKETQARVLEAILKHGDVEEAVRIVKEVTEKLSKYEVPPEKLVIHEQITRDLRDYKATGPHVAVAKRLAARGVKIRPGTVISYIVLKGSGRIGDRAIPADEFDPTKHRYDAEYYIENQVLPAVERILKAFGYRKEDLRYQKTKQVGSGAWLKVKGKKGTEAYVEQKLISEEDLNSAVDHHHHHH

SEQ ID NO: 565 - DNA, 2409 bp, Artificial Sequence
  Description of Artificial Sequence:Thermococcus species 9degreesN-7 mutant DNA polymerase, 9degreesN mutant
atgattctcgataccgactacatcaccgagaacgggaagcccgtgataagggtcttcaagaaggagaacggcgagtttaaaatcgagtacgacagaaccttcgagccctacttctacgcccttctgaaggacgattctgcgatagaggacgtcaagaaggtaaccgcaaagaggcacggaacggttgtcaaggtgaagcgcgccgagaaggtgcagaagaagttcctcggcaggccgatagaggtctggaagctctacttcaaccatcctcaggacgtcccggcgattcgagacaggatacgcgcccaccccgctgtcgttgacatctacgagtacgacatacccttcgccaagcgctacctcatcgacaagggcctgattccgatggagggcgacgaggagcttacgatgctcgccttcgcgatcgcaaccctctatcacgagggcgaggagttcggaaccgggccgattctcatgataagctacgccgacgggagcgaggcgagggtgataacctggaagaagattgaccttccgtacgttgacgtcgtctcgaccgagaaggagatgattaagcgcttcctccgcgtcgtcagggagaaggaccccgacgtgctcatcacctacaacggcgacaacttcgacttcgcctacctgaagaagcgctgtgaggaactcggaataaagttcacactcggcagggacgggagcgagccgaagatacagcgaatgggcgaccgctttgccgttgaggtgaagggcaggattcacttcgacctctaccccgtcataaggcgcacgataaacctcccgacctacacccttgaggccgtttacgaggccgtctttggaaagcccaaggagaaggtttacgcagaggagatagcgcaggcctgggagagcggggagggccttgaaagggttgcaagatactcgatggaggacgctaaggtgacctacgagctgggaagggagttcttcccgatggaggcccagctttcgaggcttataggccagagcctctgggacgtctcgcgctcgagcaccggaaatttggtggaggcattcctcctgcggaaggcctacaagaggaacgagctcgccccaaacaagcccgacgagagggagctcgcgagacggcgcgggggctacgctggcgggtacgttaaggaaccagagcggggattgtgggacaacattgtgtatttagacttccgctcgtggtatccttcaatcatcataacccacaacgtctcgccggataccctcaaccgcgagggctgtaaagagtacgacgtcgcccctgaggttggacacaagttctgcaaggacttccccggcttcataccaagcctcctgggagatttgctcgaggagaggagcaagatagagcggaagatgaaggcaacggttgacccgctggagaagaaactcctcgtgtacaggcagtggcttataaaaatcctcgccaacagcttctacggctacacaggctacgccaaggcccggtggtactgcaaggagtgcgccgagagcgttacggcctggggaagggagtatatagaaatggttatccgggaactcgaagaaaaattcggttttaaagttctctatgccgatacagacggtctccatgctaccattcccggagcagacgctgaaacagtcaagaaaaaagcaaaggagttcttaaaatacattaatccaaaactgcccggcctgctcgaacttgagtacgagggcttctacgtgaggggcttcttcgtcacgaagaagaagtacgctgtgatagacgaggagggcaagataaccacgaggggtcttgagattgtgaggcgcgactggagcgagatagcgaaggagacccaggccagggtcttagaggcgatactcaagcacggtgacgtcgaggaggccgttaggatagtcaaggaagtgacggaaaagctgagcaagtatgaggtcccgcccgagaagctggtaatccacgagcagataacgcgcgatttgagggattacaaagccaccggcccgcacgttgccgttgcgaagaggctcgcggcgcgtggagtgaaaatccggcccggcacggtgataagctacatcgtcctaaagggctctggaaggataggcgacagggcgattccagctgatgagttcgacccgacgaagcaccgctacgatgcggaatactacatcgagaaccaggttctcccggcggtggagaggattctaaaagccttcggctatcggaaggaggatttgcgctaccagaagacgaagcaggtcggctcgggcgcgtggctgaaggtgaaggggaagaagggtaccgaagcttacgtagaacaaaaactcatctcagaagaggatctgaatagcgccgtcgaccatcatcatcatcatcattga

SEQ ID NO: 566 - protein, 802 aa, Artificial Sequence
  Description of Artificial Sequence:Thermococcus species 9degreesN-7 mutant DNA polymerase, 9degreesN mutant
MILDTDYITENGKPVIRVFKKENGEFKIEYDRTFEPYFYALLKDDSAIEDVKKVTAKRHGTVVKVKRAEKVQKKFLGRPIEVWKLYFNHPQDVPAIRDRIRAHPAVVDIYEYDIPFAKRYLIDKGLIPMEGDEELTMLAFAIATLYHEGEEFGTGPILMISYADGSEARVITWKKIDLPYVDVVSTEKEMIKRFLRVVREKDPDVLITYNGDNFDFAYLKKRCEELGIKFTLGRDGSEPKIQRMGDRFAVEVKGRIHFDLYPVIRRTINLPTYTLEAVYEAVFGKPKEKVYAEEIAQAWESGEGLERVARYSMEDAKVTYELGREFFPMEAQLSRLIGQSLWDVSRSSTGNLVEAFLLRKAYKRNELAPNKPDERELARRRGGYAGGYVKEPERGLWDNIVYLDFRSWYPSIIITHNVSPDTLNREGCKEYDVAPEVGHKFCKDFPGFIPSLLGDLLEERSKIERKMKATVDPLEKKLLVYRQWLIKILANSFYGYTGYAKARWYCKECAESVTAWGREYIEMVIRELEEKFGFKVLYADTDGLHATIPGADAETVKKKAKEFLKYINPKLPGLLELEYEGFYVRGFFVTKKKYAVIDEEGKITTRGLEIVRRDWSEIAKETQARVLEAILKHGDVEEAVRIVKEVTEKLSKYEVPPEKLVIHEQITRDLRDYKATGPHVAVAKRLAARGVKIRPGTVISYIVLKGSGRIGDRAIPADEFDPTKHRYDAEYYIENQVLPAVERILKAFGYRKEDLRYQKTKQVGSGAWLKVKGKKGTEAYVEQKLISEEDLNSAVDHHHHHH

SEQ ID NO: 567 - DNA, 2409 bp, Artificial Sequence
  Description of Artificial Sequence:Thermococcus species 9degreesN-7 mutant DNA polymerase, 9degreesN mutant
atgattctcgataccgactacatcaccgagaacgggaagcccgtgataagggtcttcaagaaggagaacggcgagtttaaaatcgagtacgacagaaccttcgagccctacttctacgcccttctgaaggacgattctgcgatagaggacgtcaagaaggtaaccgcaaagaggcacggaacggttgtcaaggtgaagcgcgccgagaaggtgcagaagaagttcctcggcaggccgatagaggtctggaagctctacttcaaccatcctcaggacgtcccggcgattcgagacaggatacgcgcccaccccgctgtcgttgacatctacgagtacgacatacccttcgccaagcgctacctcatcgacaagggcctgattccgatggagggcgacgaggagcttacgatgctcgccttcgcgatcgcaaccctctatcacgagggcgaggagttcggaaccgggccgattctcatgataagctacgccgacgggagcgaggcgagggtgataacctggaagaagattgaccttccgtacgttgacgtcgtctcgaccgagaaggagatgattaagcgcttcctccgcgtcgtcagggagaaggaccccgacgtgctcatcacctacaacggcgacaacttcgacttcgcctacctgaagaagcgctgtgaggaactcggaataaagttcacactcggcagggacgggagcgagccgaagatacagcgaatgggcgaccgctttgccgttgaggtgaagggcaggattcacttcgacctctaccccgtcataaggcgcacgataaacctcccgacctacacccttgaggccgtttacgaggccgtctttggaaagcccaaggagaaggtttacgcagaggagatagcgcaggcctgggagagcggggagggccttgaaagggttgcaagatactcgatggaggacgctaaggtgacctacgagctgggaagggagttcttcccgatggaggcccagctttcgaggcttataggccagagcctctgggacgtctcgcgctcgagcaccggaaatttggtggaggcattcctcctgcggaaggcctacaagaggaacgagctcgccccaaacaagcccgacgagagggagctcgcgagacggcgcgggggctacgctggcgggtacgttaaggaaccagagcggggattgtgggacaacattgtgtatttagacttccgctcgtggtatccttcaatcatcataacccacaacgtctcgccggataccctcaaccgcgagggctgtaaagagtacgacgtcgcccctgaggttggacacaagttctgcaaggacttccccggcttcataccaagcctcctgggagatttgctcgaggaggcgagcaagatagagcggaagatgaaggcaacggttgacccgctggagaagaaactcctcgtgtacaggcagtggcttataaaaatcctcgccaacagcttctacggctactacggctacgccaaggcccggtggtactgcaaggagtgcgccgagagcgttacggcctggggaagggagtatatagaaatggttatccgggaactcgaagaaaaattcggttttaaagttctctatgccgatacagacggtctccatgctaccattcccggagcagacgctgaaacagtcaagaaaaaagcaaaggagttcttaaaatacattaatccaaaactgcccggcctgctcgaacttgagtacgagggcttctacgtgaggggcttcttcgtcacgaagaagaagtacgctgtgatagacgaggagggcaagataaccacgaggggtcttgagattgtgaggcgcgactggagcgagatagcgaaggagacccaggccagggtcttagaggcgatactcaagcacggtgacgtcgaggaggccgttaggatagtcaaggaagtgacggaaaagctgagcaagtatgaggtcccgcccgagaagctggtaatccacgagcagataacgcgcgatttgagggattacaaagccaccggcccgcacgttgccgttgcgaagaggctcgcggcgcgtggagtgaaaatccggcccggcacggtgataagctacatcgtcctaaagggctctggaaggataggcgacagggcgattccagctgatgagttcgacccgacgaagcaccgctacgatgcggaatactacatcgagaaccaggttctcccggcggtggagaggattctaaaagccttcggctatcggaaggaggatttgcgctaccagaagacgaagcaggtcggctcgggcgcgtggctgaaggtgaaggggaagaagggtaccgaagcttacgtagaacaaaaactcatctcagaagaggatctgaatagcgccgtcgaccatcatcatcatcatcattga

SEQ ID NO: 568 - protein, 802 aa, Artificial Sequence
  Description of Artificial Sequence:Thermococcus species 9degreesN-7 mutant DNA polymerase, 9degreesN mutant
MILDTDYITENGKPVIRVFKKENGEFKIEYDRTFEPYFYALLKDDSAIEDVKKVTAKRHGTVVKVKRAEKVQKKFLGRPIEVWKLYFNHPQDVPAIRDRIRAHPAVVDIYEYDIPFAKRYLIDKGLIPMEGDEELTMLAFAIATLYHEGEEFGTGPILMISYADGSEARVITWKKIDLPYVDVVSTEKEMIKRFLRVVREKDPDVLITYNGDNFDFAYLKKRCEELGIKFTLGRDGSEPKIQRMGDRFAVEVKGRIHFDLYPVIRRTINLPTYTLEAVYEAVFGKPKEKVYAEEIAQAWESGEGLERVARYSMEDAKVTYELGREFFPMEAQLSRLIGQSLWDVSRSSTGNLVEAFLLRKAYKRNELAPNKPDERELARRRGGYAGGYVKEPERGLWDNIVYLDFRSWYPSIIITHNVSPDTLNREGCKEYDVAPEVGHKFCKDFPGFIPSLLGDLLEEASKIERKMKATVDPLEKKLLVYRQWLIKILANSFYGYYGYAKARWYCKECAESVTAWGREYIEMVIRELEEKFGFKVLYADTDGLHATIPGADAETVKKKAKEFLKYINPKLPGLLELEYEGFYVRGFFVTKKKYAVIDEEGKITTRGLEIVRRDWSEIAKETQARVLEAILKHGDVEEAVRIVKEVTEKLSKYEVPPEKLVIHEQITRDLRDYKATGPHVAVAKRLAARGVKIRPGTVISYIVLKGSGRIGDRAIPADEFDPTKHRYDAEYYIENQVLPAVERILKAFGYRKEDLRYQKTKQVGSGAWLKVKGKKGTEAYVEQKLISEEDLNSAVDHHHHHH

SEQ ID NO: 569 - DNA, 2409 bp, Artificial Sequence
  Description of Artificial Sequence:Thermococcus species 9degreesN-7 mutant DNA polymerase, 9degreesN mutant
atgattctcgataccgactacatcaccgagaacgggaagcccgtgataagggtcttcaagaaggagaacggcgagtttaaaatcgagtacgacagaaccttcgagccctacttctacgcccttctgaaggacgattctgcgatagaggacgtcaagaaggtaaccgcaaagaggcacggaacggttgtcaaggtgaagcgcgccgagaaggtgcagaagaagttcctcggcaggccgatagaggtctggaagctctacttcaaccatcctcaggacgtcccggcgattcgagacaggatacgcgcccaccccgctgtcgttgacatctacgagtacgacatacccttcgccaagcgctacctcatcgacaagggcctgattccgatggagggcgacgaggagcttacgatgctcgccttcgcgatcgcaaccctctatcacgagggcgaggagttcggaaccgggccgattctcatgataagctacgccgacgggagcgaggcgagggtgataacctggaagaagattgaccttccgtacgttgacgtcgtctcgaccgagaaggagatgattaagcgcttcctccgcgtcgtcagggagaaggaccccgacgtgctcatcacctacaacggcgacaacttcgacttcgcctacctgaagaagcgctgtgaggaactcggaataaagttcacactcggcagggacgggagcgagccgaagatacagcgaatgggcgaccgctttgccgttgaggtgaagggcaggattcacttcgacctctaccccgtcataaggcgcacgataaacctcccgacctacacccttgaggccgtttacgaggccgtctttggaaagcccaaggagaaggtttacgcagaggagatagcgcaggcctgggagagcggggagggccttgaaagggttgcaagatactcgatggaggacgctaaggtgacctacgagctgggaagggagttcttcccgatggaggcccagctttcgaggcttataggccagagcctctgggacgtctcgcgctcgagcaccggaaattacgtggagtggttcctcctgcggaaggcctacaagaggaacgagctcgccccaaacaagcccgacgagagggagctcgcgagacggcgcgggggctacgctggcgggtacgttaaggaaccagagcggggattgtgggacaacattgtgtatttagacttccgctcgtggtatccttcaatcatcataacccacaacgtctcgccggataccctcaaccgcgagggctgtaaagagtacgacgtcgcccctgaggttggacacaagttctgcaaggacttccccggcttcataccaagcctcctgggagatttgctcgaggagaggcagaagatagagcggaagatgaaggcaacggttgacccgctggagaagaaactcctcgattacaggatgtggcttataaaaatcctcgccaacagccattacggctactacggctacgccaaggcccggtggtactgcaaggagtgcgccgagagcgttacggcctggggaagggagtatatagaaatggttatccgggaactcgaagaaaaattcggttttaaagttctctatgccgatacagacggtctccatgctaccattcccggagcagacgctgaaacagtcaagaaaaaagcaaaggagttcttaaaatacattaatccaaaactgcccggcctgctcgaacttgagtacgagggcttctacgtgaggggcttcttcgtcacgaagaagaagtacgctgtgatagacgaggagggcaagataaccacgaggggtcttgagattgtgaggcgcgactggagcgagatagcgaaggagacccaggccagggtcttagaggcgatactcaagcacggtgacgtcgaggaggccgttaggatagtcaaggaagtgacggaaaagctgagcaagtatgaggtcccgcccgagaagctggtaatccacgagcagataacgcgcgatttgagggattacaaagccaccggcccgcacgttgccgttgcgaagaggctcgcggcgcgtggagtgaaaatccggcccggcacggtgataagctacatcgtcctaaagggctctggaaggataggcgacagggcgattccagctgatgagttcgacccgacgaagcaccgctacgatgcggaatactacatcgagaaccaggttctcccggcggtggagaggattctaaaagccttcggctatcggaaggaggatttgcgctaccagaagacgaagcaggtcggctcgggcgcgtggctgaaggtgaaggggaagaagggtaccgaagcttacgtagaacaaaaactcatctcagaagaggatctgaatagcgccgtcgaccatcatcatcatcatcattga

SEQ ID NO: 570 - protein, 802 aa, Artificial Sequence
  Description of Artificial Sequence:Thermococcus species 9degreesN-7 mutant DNA polymerase, 9degreesN mutant
MILDTDYITENGKPVIRVFKKENGEFKIEYDRTFEPYFYALLKDDSAIEDVKKVTAKRHGTVVKVKRAEKVQKKFLGRPIEVWKLYFNHPQDVPAIRDRIRAHPAVVDIYEYDIPFAKRYLIDKGLIPMEGDEELTMLAFAIATLYHEGEEFGTGPILMISYADGSEARVITWKKIDLPYVDVVSTEKEMIKRFLRVVREKDPDVLITYNGDNFDFAYLKKRCEELGIKFTLGRDGSEPKIQRMGDRFAVEVKGRIHFDLYPVIRRTINLPTYTLEAVYEAVFGKPKEKVYAEEIAQAWESGEGLERVARYSMEDAKVTYELGREFFPMEAQLSRLIGQSLWDVSRSSTGNYVEWFLLRKAYKRNELAPNKPDERELARRRGGYAGGYVKEPERGLWDNIVYLDFRSWYPSIIITHNVSPDTLNREGCKEYDVAPEVGHKFCKDFPGFIPSLLGDLLEERQKIERKMKATVDPLEKKLLDYRMWLIKILANSHYGYYGYAKARWYCKECAESVTAWGREYIEMVIRELEEKFGFKVLYADTDGLHATIPGADAETVKKKAKEFLKYINPKLPGLLELEYEGFYVRGFFVTKKKYAVIDEEGKITTRGLEIVRRDWSEIAKETQARVLEAILKHGDVEEAVRIVKEVTEKLSKYEVPPEKLVIHEQITRDLRDYKATGPHVAVAKRLAARGVKIRPGTVISYIVLKGSGRIGDRAIPADEFDPTKHRYDAEYYIENQVLPAVERILKAFGYRKEDLRYQKTKQVGSGAWLKVKGKKGTEAYVEQKLISEEDLNSAVDHHHHHH

SEQ ID NO: 571 - DNA, 2409 bp, Artificial Sequence
  Description of Artificial Sequence:Thermococcus species 9degreesN-7 mutant DNA polymerase, 9degreesN mutant
atgattctcgataccgactacatcaccgagaacgggaagcccgtgataagggtcttcaagaaggagaacggcgagtttaaaatcgagtacgacagaaccttcgagccctacttctacgcccttctgaaggacgattctgcgatagaggacgtcaagaaggtaaccgcaaagaggcacggaacggttgtcaaggtgaagcgcgccgagaaggtgcagaagaagttcctcggcaggccgatagaggtctggaagctctacttcaaccatcctcaggacgtcccggcgattcgagacaggatacgcgcccaccccgctgtcgttgacatctacgagtacgacatacccttcgccaagcgctacctcatcgacaagggcctgattccgatggagggcgacgaggagcttacgatgctcgccttcgcgatcgcaaccctctatcacgagggcgaggagttcggaaccgggccgattctcatgataagctacgccgacgggagcgaggcgagggtgataacctggaagaagattgaccttccgtacgttgacgtcgtctcgaccgagaaggagatgattaagcgcttcctccgcgtcgtcagggagaaggaccccgacgtgctcatcacctacaacggcgacaacttcgacttcgcctacctgaagaagcgctgtgaggaactcggaataaagttcacactcggcagggacgggagcgagccgaagatacagcgaatgggcgaccgctttgccgttgaggtgaagggcaggattcacttcgacctctaccccgtcataaggcgcacgataaacctcccgacctacacccttgaggccgtttacgaggccgtctttggaaagcccaaggagaaggtttacgcagaggagatagcgcaggcctgggagagcggggagggccttgaaagggttgcaagatactcgatggaggacgctaaggtgacctacgagctgggaagggagttcttcccgatggaggcccagctttcgaggcttataggccagagcctctgggacgtctcgcgctcgagcaccggaaattacgtggagtggttcctcctgcggaccgcctacaagaggaacgagctcgccccaaacaagcccgacgagagggagctcgcgagacggcgcgggggctacgctggcgggtacgttaaggaaccagagcggggattgtgggacaacattgtgtatttagacttccgctcgtggtatccttcaatcatcataacccacaacgtctcgccggataccctcaaccgcgagggctgtaaagagtacgacgtcgcccctgaggttggacacaagttctgcaaggacttccccggcttcataccaagcctcctgggagatttgctcgaggagaggcagaagatagagcggaagatgaaggcaacggttgacccgctggagaagaaactcctcgattacaggatgtggcttataaaaatcctcgccaacagcttctacggctactacggctacgccaaggcccggtggtactgcaaggagtgcgccgagagcgttacggcctggggaagggagtatatagaaatggttatccgggaactcgaagaaaaattcggttttaaagttctctatgccgatacagacggtctccatgctaccattcccggagcagacgctgaaacagtcaagaaaaaagcaaaggagttcttaaaatacattaatccaaaactgcccggcctgctcgaacttgagtacgagggcttctacgtgaggggcttcttcgtcacgaagaagaagtacgctgtgatagacgaggagggcaagataaccacgaggggtcttgagattgtgaggcgcgactggagcgagatagcgaaggagacccaggccagggtcttagaggcgatactcaagcacggtgacgtcgaggaggccgttaggatagtcaaggaagtgacggaaaagctgagcaagtatgaggtcccgcccgagaagctggtaatccacgagcagataacgcgcgatttgagggattacaaagccaccggcccgcacgttgccgttgcgaagaggctcgcggcgcgtggagtgaaaatccggcccggcacggtgataagctacatcgtcctaaagggctctggaaggataggcgacagggcgattccagctgatgagttcgacccgacgaagcaccgctacgatgcggaatactacatcgagaaccaggttctcccggcggtggagaggattctaaaagccttcggctatcggaaggaggatttgcgctaccagaagacgaagcaggtcggctcgggcgcgtggctgaaggtgaaggggaagaagggtaccgaagcttacgtagaacaaaaactcatctcagaagaggatctgaatagcgccgtcgaccatcatcatcatcatcattga

SEQ ID NO: 572 - protein, 802 aa, Artificial Sequence
  Description of Artificial Sequence:Thermococcus species 9degreesN-7 mutant DNA polymerase, 9degreesN mutant
MILDTDYITENGKPVIRVFKKENGEFKIEYDRTFEPYFYALLKDDSAIEDVKKVTAKRHGTVVKVKRAEKVQKKFLGRPIEVWKLYFNHPQDVPAIRDRIRAHPAVVDIYEYDIPFAKRYLIDKGLIPMEGDEELTMLAFAIATLYHEGEEFGTGPILMISYADGSEARVITWKKIDLPYVDVVSTEKEMIKRFLRVVREKDPDVLITYNGDNFDFAYLKKRCEELGIKFTLGRDGSEPKIQRMGDRFAVEVKGRIHFDLYPVIRRTINLPTYTLEAVYEAVFGKPKEKVYAEEIAQAWESGEGLERVARYSMEDAKVTYELGREFFPMEAQLSRLIGQSLWDVSRSSTGNYVEWFLLRTAYKRNELAPNKPDERELARRRGGYAGGYVKEPERGLWDNIVYLDFRSWYPSIIITHNVSPDTLNREGCKEYDVAPEVGHKFCKDFPGFIPSLLGDLLEERQKIERKMKATVDPLEKKLLDYRMWLIKILANSFYGYYGYAKARWYCKECAESVTAWGREYIEMVIRELEEKFGFKVLYADTDGLHATIPGADAETVKKKAKEFLKYINPKLPGLLELEYEGFYVRGFFVTKKKYAVIDEEGKITTRGLEIVRRDWSEIAKETQARVLEAILKHGDVEEAVRIVKEVTEKLSKYEVPPEKLVIHEQITRDLRDYKATGPHVAVAKRLAARGVKIRPGTVISYIVLKGSGRIGDRAIPADEFDPTKHRYDAEYYIENQVLPAVERILKAFGYRKEDLRYQKTKQVGSGAWLKVKGKKGTEAYVEQKLISEEDLNSAVDHHHHHH

SEQ ID NO: 573 - DNA, 2409 bp, Artificial Sequence
  Description of Artificial Sequence:Thermococcus species 9degreesN-7 mutant DNA polymerase, 9degreesN mutant
atgattctcgataccgactacatcaccgagaacgggaagcccgtgataagggtcttcaagaaggagaacggcgagtttaaaatcgagtacgacagaaccttcgagccctacttctacgcccttctgaaggacgattctgcgatagaggacgtcaagaaggtaaccgcaaagaggcacggaacggttgtcaaggtgaagcgcgccgagaaggtgcagaagaagttcctcggcaggccgatagaggtctggaagctctacttcaaccatcctcaggacgtcccggcgattcgagacaggatacgcgcccaccccgctgtcgttgacatctacgagtacgacatacccttcgccaagcgctacctcatcgacaagggcctgattccgatggagggcgacgaggagcttacgatgctcgccttcgcgatcgcaaccctctatcacgagggcgaggagttcggaaccgggccgattctcatgataagctacgccgacgggagcgaggcgagggtgataacctggaagaagattgaccttccgtacgttgacgtcgtctcgaccgagaaggagatgattaagcgcttcctccgcgtcgtcagggagaaggaccccgacgtgctcatcacctacaacggcgacaacttcgacttcgcctacctgaagaagcgctgtgaggaactcggaataaagttcacactcggcagggacgggagcgagccgaagatacagcgaatgggcgaccgctttgccgttgaggtgaagggcaggattcacttcgacctctaccccgtcataaggcgcacgataaacctcccgacctacacccttgaggccgtttacgaggccgtctttggaaagcccaaggagaaggtttacgcagaggagatagcgcaggcctgggagagcggggagggccttgaaagggttgcaagatactcgatggaggacgctaaggtgacctacgagctgggaagggagttcttcccgatggaggcccagctttcgaggcttataggccagagcctctgggacgtctcgcgctcgagcaccggaaatttggtggaggcattcctcctgcggaaggcctacaagaggaacgagctcgccccaaacaagcccgacgagagggagctcgcgagacggcgcgggggctacgctggcgggtacgttaaggaaccagagcggggattgtgggacaacattgtgtatttagacttccgctcgtggtatccttcaatcatcataacccacaacgtctcgccggataccctcaaccgcgagggctgtaaagagtacgacgtcgcccctgaggttggacacaagttctgcaaggacttccccggcttcataccaagcctcctgggagatttgctcgaggaggcgagcaagatagagcggaagatgaaggcaacggttgacccgctggagaagaaactcctcgtgtacaggcagtggcttataagcatcctcgccaacagcttctacggctactacggctacgccaaggcccggtggtactgcaaggagtgcgccgagagcgttacggcctggggaagggagtatatagaaatggttatccgggaactcgaagaaaaattcggttttaaagttctctatgccgatacagacggtctccatgctaccattcccggagcagacgctgaaacagtcaagaaaaaagcaaaggagttcttaaaatacattaatccaaaactgcccggcctgctcgaacttgagtacgagggcttctacgtgaggggcttcttcgtcacgaagaagaagtacgctgtgatagacgaggagggcaagataaccacgaggggtcttgagattgtgaggcgcgactggagcgagatagcgaaggagacccaggccagggtcttagaggcgatactcaagcacggtgacgtcgaggaggccgttaggatagtcaaggaagtgacggaaaagctgagcaagtatgaggtcccgcccgagaagctggtaatccacgagcagataacgcgcgatttgagggattacaaagccaccggcccgcacgttgccgttgcgaagaggctcgcggcgcgtggagtgaaaatccggcccggcacggtgataagctacatcgtcctaaagggctctggaaggataggcgacagggcgattccagctgatgagttcgacccgacgaagcaccgctacgatgcggaatactacatcgagaaccaggttctcccggcggtggagaggattctaaaagccttcggctatcggaaggaggatttgcgctaccagaagacgaagcaggtcggctcgggcgcgtggctgaaggtgaaggggaagaagggtaccgaagcttacgtagaacaaaaactcatctcagaagaggatctgaatagcgccgtcgaccatcatcatcatcatcattga

SEQ ID NO: 574 - protein, 802 aa, Artificial Sequence
  Description of Artificial Sequence:Thermococcus species 9degreesN-7 mutant DNA polymerase, 9degreesN mutant
MILDTDYITENGKPVIRVFKKENGEFKIEYDRTFEPYFYALLKDDSAIEDVKKVTAKRHGTVVKVKRAEKVQKKFLGRPIEVWKLYFNHPQDVPAIRDRIRAHPAVVDIYEYDIPFAKRYLIDKGLIPMEGDEELTMLAFAIATLYHEGEEFGTGPILMISYADGSEARVITWKKIDLPYVDVVSTEKEMIKRFLRVVREKDPDVLITYNGDNFDFAYLKKRCEELGIKFTLGRDGSEPKIQRMGDRFAVEVKGRIHFDLYPVIRRTINLPTYTLEAVYEAVFGKPKEKVYAEEIAQAWESGEGLERVARYSMEDAKVTYELGREFFPMEAQLSRLIGQSLWDVSRSSTGNLVEAFLLRKAYKRNELAPNKPDERELARRRGGYAGGYVKEPERGLWDNIVYLDFRSWYPSIIITHNVSPDTLNREGCKEYDVAPEVGHKFCKDFPGFIPSLLGDLLEEASKIERKMKATVDPLEKKLLVYRQWLISILANSFYGYYGYAKARWYCKECAESVTAWGREYIEMVIRELEEKFGFKVLYADTDGLHATIPGADAETVKKKAKEFLKYINPKLPGLLELEYEGFYVRGFFVTKKKYAVIDEEGKITTRGLEIVRRDWSEIAKETQARVLEAILKHGDVEEAVRIVKEVTEKLSKYEVPPEKLVIHEQITRDLRDYKATGPHVAVAKRLAARGVKIRPGTVISYIVLKGSGRIGDRAIPADEFDPTKHRYDAEYYIENQVLPAVERILKAFGYRKEDLRYQKTKQVGSGAWLKVKGKKGTEAYVEQKLISEEDLNSAVDHHHHHH

SEQ ID NO: 575 - DNA, 2409 bp, Artificial Sequence
  Description of Artificial Sequence:Thermococcus species 9degreesN-7 mutant DNA polymerase, 9degreesN mutant
atgattctcgataccgactacatcaccgagaacgggaagcccgtgataagggtcttcaagaaggagaacggcgagtttaaaatcgagtacgacagaaccttcgagccctacttctacgcccttctgaaggacgattctgcgatagaggacgtcaagaaggtaaccgcaaagaggcacggaacggttgtcaaggtgaagcgcgccgagaaggtgcagaagaagttcctcggcaggccgatagaggtctggaagctctacttcaaccatcctcaggacgtcccggcgattcgagacaggatacgcgcccaccccgctgtcgttgacatctacgagtacgacatacccttcgccaagcgctacctcatcgacaagggcctgattccgatggagggcgacgaggagcttacgatgctcgccttcgcgatcgcaaccctctatcacgagggcgaggagttcggaaccgggccgattctcatgataagctacgccgacgggagcgaggcgagggtgataacctggaagaagattgaccttccgtacgttgacgtcgtctcgaccgagaaggagatgattaagcgcttcctccgcgtcgtcagggagaaggaccccgacgtgctcatcacctacaacggcgacaacttcgacttcgcctacctgaagaagcgctgtgaggaactcggaataaagttcacactcggcagggacgggagcgagccgaagatacagcgaatgggcgaccgctttgccgttgaggtgaagggcaggattcacttcgacctctaccccgtcataaggcgcacgataaacctcccgacctacacccttgaggccgtttacgaggccgtctttggaaagcccaaggagaaggtttacgcagaggagatagcgcaggcctgggagagcggggagggccttgaaagggttgcaagatactcgatggaggacgctaaggtgacctacgagctgggaagggagttcttcccgatggaggcccagctttcgaggcttataggccagagcctctgggacgtctcgcgctcgagcaccggaaatttggtggaggcattcctcctgcggaaggcctacaagaggaacgagctcgccccaaacaagcccgacgagagggagctcgcgagacggcgcgggggctacgctggcgggtacgttaaggaaccagagcggggattgtgggacaacattgtgtatttagacttccgctcgtggtatccttcaatcatcataacccacaacgtctcgccggataccctcaaccgcgagggctgtaaagagtacgacgtcgcccctgaggttggacacaagttctgcaaggacttccccggcttcataccaagcctcctgggagatttgctcgaggaggcgagcaagatagagcggaagatgaaggcaacggttgacccgctggagaagaaactcctcgtgtacaggcagtggcttataatcatcctcgccaacagcttctacggctactacggctacgccaaggcccggtggtactgcaaggagtgcgccgagagcgttacggcctggggaagggagtatatagaaatggttatccgggaactcgaagaaaaattcggttttaaagttctctatgccgatacagacggtctccatgctaccattcccggagcagacgctgaaacagtcaagaaaaaagcaaaggagttcttaaaatacattaatccaaaactgcccggcctgctcgaacttgagtacgagggcttctacgtgaggggcttcttcgtcacgaagaagaagtacgctgtgatagacgaggagggcaagataaccacgaggggtcttgagattgtgaggcgcgactggagcgagatagcgaaggagacccaggccagggtcttagaggcgatactcaagcacggtgacgtcgaggaggccgttaggatagtcaaggaagtgacggaaaagctgagcaagtatgaggtcccgcccgagaagctggtaatccacgagcagataacgcgcgatttgagggattacaaagccaccggcccgcacgttgccgttgcgaagaggctcgcggcgcgtggagtgaaaatccggcccggcacggtgataagctacatcgtcctaaagggctctggaaggataggcgacagggcgattccagctgatgagttcgacccgacgaagcaccgctacgatgcggaatactacatcgagaaccaggttctcccggcggtggagaggattctaaaagccttcggctatcggaaggaggatttgcgctaccagaagacgaagcaggtcggctcgggcgcgtggctgaaggtgaaggggaagaagggtaccgaagcttacgtagaacaaaaactcatctcagaagaggatctgaatagcgccgtcgaccatcatcatcatcatcattga

SEQ ID NO: 576 - protein, 802 aa, Artificial Sequence
  Description of Artificial Sequence:Thermococcus species 9degreesN-7 mutant DNA polymerase, 9degreesN mutant
MILDTDYITENGKPVIRVFKKENGEFKIEYDRTFEPYFYALLKDDSAIEDVKKVTAKRHGTVVKVKRAEKVQKKFLGRPIEVWKLYFNHPQDVPAIRDRIRAHPAVVDIYEYDIPFAKRYLIDKGLIPMEGDEELTMLAFAIATLYHEGEEFGTGPILMISYADGSEARVITWKKIDLPYVDVVSTEKEMIKRFLRVVREKDPDVLITYNGDNFDFAYLKKRCEELGIKFTLGRDGSEPKIQRMGDRFAVEVKGRIHFDLYPVIRRTINLPTYTLEAVYEAVFGKPKEKVYAEEIAQAWESGEGLERVARYSMEDAKVTYELGREFFPMEAQLSRLIGQSLWDVSRSSTGNLVEAFLLRKAYKRNELAPNKPDERELARRRGGYAGGYVKEPERGLWDNIVYLDFRSWYPSIIITHNVSPDTLNREGCKEYDVAPEVGHKFCKDFPGFIPSLLGDLLEEASKIERKMKATVDPLEKKLLVYRQWLIIILANSFYGYYGYAKARWYCKECAESVTAWGREYIEMVIRELEEKFGFKVLYADTDGLHATIPGADAETVKKKAKEFLKYINPKLPGLLELEYEGFYVRGFFVTKKKYAVIDEEGKITTRGLEIVRRDWSEIAKETQARVLEAILKHGDVEEAVRIVKEVTEKLSKYEVPPEKLVIHEQITRDLRDYKATGPHVAVAKRLAARGVKIRPGTVISYIVLKGSGRIGDRAIPADEFDPTKHRYDAEYYIENQVLPAVERILKAFGYRKEDLRYQKTKQVGSGAWLKVKGKKGTEAYVEQKLISEEDLNSAVDHHHHHH

SEQ ID NO: 577 - DNA, 2409 bp, Artificial Sequence
  Description of Artificial Sequence:Thermococcus species 9degreesN-7 mutant DNA polymerase, 9degreesN mutant
atgattctcgataccgactacatcaccgagaacgggaagcccgtgataagggtcttcaagaaggagaacggcgagtttaaaatcgagtacgacagaaccttcgagccctacttctacgcccttctgaaggacgattctgcgatagaggacgtcaagaaggtaaccgcaaagaggcacggaacggttgtcaaggtgaagcgcgccgagaaggtgcagaagaagttcctcggcaggccgatagaggtctggaagctctacttcaaccatcctcaggacgtcccggcgattcgagacaggatacgcgcccaccccgctgtcgttgacatctacgagtacgacatacccttcgccaagcgctacctcatcgacaagggcctgattccgatggagggcgacgaggagcttacgatgctcgccttcgcgatcgcaaccctctatcacgagggcgaggagttcggaaccgggccgattctcatgataagctacgccgacgggagcgaggcgagggtgataacctggaagaagattgaccttccgtacgttgacgtcgtctcgaccgagaaggagatgattaagcgcttcctccgcgtcgtcagggagaaggaccccgacgtgctcatcacctacaacggcgacaacttcgacttcgcctacctgaagaagcgctgtgaggaactcggaataaagttcacactcggcagggacgggagcgagccgaagatacagcgaatgggcgaccgctttgccgttgaggtgaagggcaggattcacttcgacctctaccccgtcataaggcgcacgataaacctcccgacctacacccttgaggccgtttacgaggccgtctttggaaagcccaaggagaaggtttacgcagaggagatagcgcaggcctgggagagcggggagggccttgaaagggttgcaagatactcgatggaggacgctaaggtgacctacgagctgggaagggagttcttcccgatggaggcccagctttcgaggcttataggccagagcctctgggacgtctcgcgctcgagcaccggaaatttggtggaggcattcctcctgcggaaggcctacaagaggaacgagctcgccccaaacaagcccgacgagagggagctcgcgagacggcgcgggggctacgctggcgggtacgttaaggaaccagagcggggattgtgggacaacattgtgtatttagacttccgctcgtggtatccttcaatcatcataacccacaacgtctcgccggataccctcaaccgcgagggctgtaaagagtacgacgtcgcccctgaggttggacacaagttctgcaaggacttccccggcttcataccaagcctcctgggagatttgctcgaggaggcgagcaagatagagcggaagatgaaggcaacggttgacccgctggagaagaaactcctcgtgtacaggcagtggcttatactgatcctcgccaacagcttctacggctactacggctacgccaaggcccggtggtactgcaaggagtgcgccgagagcgttacggcctggggaagggagtatatagaaatggttatccgggaactcgaagaaaaattcggttttaaagttctctatgccgatacagacggtctccatgctaccattcccggagcagacgctgaaacagtcaagaaaaaagcaaaggagttcttaaaatacattaatccaaaactgcccggcctgctcgaacttgagtacgagggcttctacgtgaggggcttcttcgtcacgaagaagaagtacgctgtgatagacgaggagggcaagataaccacgaggggtcttgagattgtgaggcgcgactggagcgagatagcgaaggagacccaggccagggtcttagaggcgatactcaagcacggtgacgtcgaggaggccgttaggatagtcaaggaagtgacggaaaagctgagcaagtatgaggtcccgcccgagaagctggtaatccacgagcagataacgcgcgatttgagggattacaaagccaccggcccgcacgttgccgttgcgaagaggctcgcggcgcgtggagtgaaaatccggcccggcacggtgataagctacatcgtcctaaagggctctggaaggataggcgacagggcgattccagctgatgagttcgacccgacgaagcaccgctacgatgcggaatactacatcgagaaccaggttctcccggcggtggagaggattctaaaagccttcggctatcggaaggaggatttgcgctaccagaagacgaagcaggtcggctcgggcgcgtggctgaaggtgaaggggaagaagggtaccgaagcttacgtagaacaaaaactcatctcagaagaggatctgaatagcgccgtcgaccatcatcatcatcatcattga

SEQ ID NO: 578 - protein, 802 aa, Artificial Sequence
  Description of Artificial Sequence:Thermococcus species 9degreesN-7 mutant DNA polymerase, 9degreesN mutant
MILDTDYITENGKPVIRVFKKENGEFKIEYDRTFEPYFYALLKDDSAIEDVKKVTAKRHGTVVKVKRAEKVQKKFLGRPIEVWKLYFNHPQDVPAIRDRIRAHPAVVDIYEYDIPFAKRYLIDKGLIPMEGDEELTMLAFAIATLYHEGEEFGTGPILMISYADGSEARVITWKKIDLPYVDVVSTEKEMIKRFLRVVREKDPDVLITYNGDNFDFAYLKKRCEELGIKFTLGRDGSEPKIQRMGDRFAVEVKGRIHFDLYPVIRRTINLPTYTLEAVYEAVFGKPKEKVYAEEIAQAWESGEGLERVARYSMEDAKVTYELGREFFPMEAQLSRLIGQSLWDVSRSSTGNLVEAFLLRKAYKRNELAPNKPDERELARRRGGYAGGYVKEPERGLWDNIVYLDFRSWYPSIIITHNVSPDTLNREGCKEYDVAPEVGHKFCKDFPGFIPSLLGDLLEEASKIERKMKATVDPLEKKLLVYRQWLILILANSFYGYYGYAKARWYCKECAESVTAWGREYIEMVIRELEEKFGFKVLYADTDGLHATIPGADAETVKKKAKEFLKYINPKLPGLLELEYEGFYVRGFFVTKKKYAVIDEEGKITTRGLEIVRRDWSEIAKETQARVLEAILKHGDVEEAVRIVKEVTEKLSKYEVPPEKLVIHEQITRDLRDYKATGPHVAVAKRLAARGVKIRPGTVISYIVLKGSGRIGDRAIPADEFDPTKHRYDAEYYIENQVLPAVERILKAFGYRKEDLRYQKTKQVGSGAWLKVKGKKGTEAYVEQKLISEEDLNSAVDHHHHHH

SEQ ID NO: 579 - DNA, 2409 bp, Artificial Sequence
  Description of Artificial Sequence:Thermococcus species 9degreesN-7 mutant DNA polymerase, 9degreesN mutant
atgattctcgataccgactacatcaccgagaacgggaagcccgtgataagggtcttcaagaaggagaacggcgagtttaaaatcgagtacgacagaaccttcgagccctacttctacgcccttctgaaggacgattctgcgatagaggacgtcaagaaggtaaccgcaaagaggcacggaacggttgtcaaggtgaagcgcgccgagaaggtgcagaagaagttcctcggcaggccgatagaggtctggaagctctacttcaaccatcctcaggacgtcccggcgattcgagacaggatacgcgcccaccccgctgtcgttgacatctacgagtacgacatacccttcgccaagcgctacctcatcgacaagggcctgattccgatggagggcgacgaggagcttacgatgctcgccttcgcgatcgcaaccctctatcacgagggcgaggagttcggaaccgggccgattctcatgataagctacgccgacgggagcgaggcgagggtgataacctggaagaagattgaccttccgtacgttgacgtcgtctcgaccgagaaggagatgattaagcgcttcctccgcgtcgtcagggagaaggaccccgacgtgctcatcacctacaacggcgacaacttcgacttcgcctacctgaagaagcgctgtgaggaactcggaataaagttcacactcggcagggacgggagcgagccgaagatacagcgaatgggcgaccgctttgccgttgaggtgaagggcaggattcacttcgacctctaccccgtcataaggcgcacgataaacctcccgacctacacccttgaggccgtttacgaggccgtctttggaaagcccaaggagaaggtttacgcagaggagatagcgcaggcctgggagagcggggagggccttgaaagggttgcaagatactcgatggaggacgctaaggtgacctacgagctgggaagggagttcttcccgatggaggcccagctttcgaggcttataggccagagcctctgggacgtctcgcgctcgagcaccggaaatttggtggaggcattcctcctgcggaaggcctacaagaggaacgagctcgccccaaacaagcccgacgagagggagctcgcgagacggcgcgggggctacgctggcgggtacgttaaggaaccagagcggggattgtgggacaacattgtgtatttagacttccgctcgtggtatccttcaatcatcataacccacaacgtctcgccggataccctcaaccgcgagggctgtaaagagtacgacgtcgcccctgaggttggacacaagttctgcaaggacttccccggcttcataccaagcctcctgggagatttgctcgaggaggcgagcaagatagagcggaagatgaaggcaacggttgacccgctggagaagaaactcctcgtgtacaggcagtggcttataactatcctcgccaacagcttctacggctactacggctacgccaaggcccggtggtactgcaaggagtgcgccgagagcgttacggcctggggaagggagtatatagaaatggttatccgggaactcgaagaaaaattcggttttaaagttctctatgccgatacagacggtctccatgctaccattcccggagcagacgctgaaacagtcaagaaaaaagcaaaggagttcttaaaatacattaatccaaaactgcccggcctgctcgaacttgagtacgagggcttctacgtgaggggcttcttcgtcacgaagaagaagtacgctgtgatagacgaggagggcaagataaccacgaggggtcttgagattgtgaggcgcgactggagcgagatagcgaaggagacccaggccagggtcttagaggcgatactcaagcacggtgacgtcgaggaggccgttaggatagtcaaggaagtgacggaaaagctgagcaagtatgaggtcccgcccgagaagctggtaatccacgagcagataacgcgcgatttgagggattacaaagccaccggcccgcacgttgccgttgcgaagaggctcgcggcgcgtggagtgaaaatccggcccggcacggtgataagctacatcgtcctaaagggctctggaaggataggcgacagggcgattccagctgatgagttcgacccgacgaagcaccgctacgatgcggaatactacatcgagaaccaggttctcccggcggtggagaggattctaaaagccttcggctatcggaaggaggatttgcgctaccagaagacgaagcaggtcggctcgggcgcgtggctgaaggtgaaggggaagaagggtaccgaagcttacgtagaacaaaaactcatctcagaagaggatctgaatagcgccgtcgaccatcatcatcatcatcattga

SEQ ID NO: 580 - protein, 802 aa, Artificial Sequence
  Description of Artificial Sequence:Thermococcus species 9degreesN-7 mutant DNA polymerase, 9degreesN mutant
MILDTDYITENGKPVIRVFKKENGEFKIEYDRTFEPYFYALLKDDSAIEDVKKVTAKRHGTVVKVKRAEKVQKKFLGRPIEVWKLYFNHPQDVPAIRDRIRAHPAVVDIYEYDIPFAKRYLIDKGLIPMEGDEELTMLAFAIATLYHEGEEFGTGPILMISYADGSEARVITWKKIDLPYVDVVSTEKEMIKRFLRVVREKDPDVLITYNGDNFDFAYLKKRCEELGIKFTLGRDGSEPKIQRMGDRFAVEVKGRIHFDLYPVIRRTINLPTYTLEAVYEAVFGKPKEKVYAEEIAQAWESGEGLERVARYSMEDAKVTYELGREFFPMEAQLSRLIGQSLWDVSRSSTGNLVEAFLLRKAYKRNELAPNKPDERELARRRGGYAGGYVKEPERGLWDNIVYLDFRSWYPSIIITHNVSPDTLNREGCKEYDVAPEVGHKFCKDFPGFIPSLLGDLLEEASKIERKMKATVDPLEKKLLVYRQWLITILANSFYGYYGYAKARWYCKECAESVTAWGREYIEMVIRELEEKFGFKVLYADTDGLHATIPGADAETVKKKAKEFLKYINPKLPGLLELEYEGFYVRGFFVTKKKYAVIDEEGKITTRGLEIVRRDWSEIAKETQARVLEAILKHGDVEEAVRIVKEVTEKLSKYEVPPEKLVIHEQITRDLRDYKATGPHVAVAKRLAARGVKIRPGTVISYIVLKGSGRIGDRAIPADEFDPTKHRYDAEYYIENQVLPAVERILKAFGYRKEDLRYQKTKQVGSGAWLKVKGKKGTEAYVEQKLISEEDLNSAVDHHHHHH

SEQ ID NO: 581 - DNA, 2409 bp, Artificial Sequence
  Description of Artificial Sequence:Thermococcus species 9degreesN-7 mutant DNA polymerase, 9degreesN mutant
atgattctcgataccgactacatcaccgagaacgggaagcccgtgataagggtcttcaagaaggagaacggcgagtttaaaatcgagtacgacagaaccttcgagccctacttctacgcccttctgaaggacgattctgcgatagaggacgtcaagaaggtaaccgcaaagaggcacggaacggttgtcaaggtgaagcgcgccgagaaggtgcagaagaagttcctcggcaggccgatagaggtctggaagctctacttcaaccatcctcaggacgtcccggcgattcgagacaggatacgcgcccaccccgctgtcgttgacatctacgagtacgacatacccttcgccaagcgctacctcatcgacaagggcctgattccgatggagggcgacgaggagcttacgatgctcgccttcgcgatcgcaaccctctatcacgagggcgaggagttcggaaccgggccgattctcatgataagctacgccgacgggagcgaggcgagggtgataacctggaagaagattgaccttccgtacgttgacgtcgtctcgaccgagaaggagatgattaagcgcttcctccgcgtcgtcagggagaaggaccccgacgtgctcatcacctacaacggcgacaacttcgacttcgcctacctgaagaagcgctgtgaggaactcggaataaagttcacactcggcagggacgggagcgagccgaagatacagcgaatgggcgaccgctttgccgttgaggtgaagggcaggattcacttcgacctctaccccgtcataaggcgcacgataaacctcccgacctacacccttgaggccgtttacgaggccgtctttggaaagcccaaggagaaggtttacgcagaggagatagcgcaggcctgggagagcggggagggccttgaaagggttgcaagatactcgatggaggacgctaaggtgacctacgagctgggaagggagttcttcccgatggaggcccagctttcgaggcttataggccagagcctctgggacgtctcgcgctcgagcaccggaaatttggtggaggcattcctcctgcggaaggcctacaagaggaacgagctcgccccaaacaagcccgacgagagggagctcgcgagacggcgcgggggctacgctggcgggtacgttaaggaaccagagcggggattgtgggacaacattgtgtatttagacttccgctcgtggtatccttcaatcatcataacccacaacgtctcgccggataccctcaaccgcgagggctgtaaagagtacgacgtcgcccctgaggttggacacaagttctgcaaggacttccccggcttcataccaagcctcctgggagatttgctcgaggaggcgagcaagatagagcggaagatgaaggcaacggttgacccgctggagaagaaactcctcgtgtacaggcagtggcttatacatatcctcgccaacagcttctacggctactacggctacgccaaggcccggtggtactgcaaggagtgcgccgagagcgttacggcctggggaagggagtatatagaaatggttatccgggaactcgaagaaaaattcggttttaaagttctctatgccgatacagacggtctccatgctaccattcccggagcagacgctgaaacagtcaagaaaaaagcaaaggagttcttaaaatacattaatccaaaactgcccggcctgctcgaacttgagtacgagggcttctacgtgaggggcttcttcgtcacgaagaagaagtacgctgtgatagacgaggagggcaagataaccacgaggggtcttgagattgtgaggcgcgactggagcgagatagcgaaggagacccaggccagggtcttagaggcgatactcaagcacggtgacgtcgaggaggccgttaggatagtcaaggaagtgacggaaaagctgagcaagtatgaggtcccgcccgagaagctggtaatccacgagcagataacgcgcgatttgagggattacaaagccaccggcccgcacgttgccgttgcgaagaggctcgcggcgcgtggagtgaaaatccggcccggcacggtgataagctacatcgtcctaaagggctctggaaggataggcgacagggcgattccagctgatgagttcgacccgacgaagcaccgctacgatgcggaatactacatcgagaaccaggttctcccggcggtggagaggattctaaaagccttcggctatcggaaggaggatttgcgctaccagaagacgaagcaggtcggctcgggcgcgtggctgaaggtgaaggggaagaagggtaccgaagcttacgtagaacaaaaactcatctcagaagaggatctgaatagcgccgtcgaccatcatcatcatcatcattga

SEQ ID NO: 582 - protein, 802 aa, Artificial Sequence
  Description of Artificial Sequence:Thermococcus species 9degreesN-7 mutant DNA polymerase, 9degreesN mutant
MILDTDYITENGKPVIRVFKKENGEFKIEYDRTFEPYFYALLKDDSAIEDVKKVTAKRHGTVVKVKRAEKVQKKFLGRPIEVWKLYFNHPQDVPAIRDRIRAHPAVVDIYEYDIPFAKRYLIDKGLIPMEGDEELTMLAFAIATLYHEGEEFGTGPILMISYADGSEARVITWKKIDLPYVDVVSTEKEMIKRFLRVVREKDPDVLITYNGDNFDFAYLKKRCEELGIKFTLGRDGSEPKIQRMGDRFAVEVKGRIHFDLYPVIRRTINLPTYTLEAVYEAVFGKPKEKVYAEEIAQAWESGEGLERVARYSMEDAKVTYELGREFFPMEAQLSRLIGQSLWDVSRSSTGNLVEAFLLRKAYKRNELAPNKPDERELARRRGGYAGGYVKEPERGLWDNIVYLDFRSWYPSIIITHNVSPDTLNREGCKEYDVAPEVGHKFCKDFPGFIPSLLGDLLEEASKIERKMKATVDPLEKKLLVYRQWLIHILANSFYGYYGYAKARWYCKECAESVTAWGREYIEMVIRELEEKFGFKVLYADTDGLHATIPGADAETVKKKAKEFLKYINPKLPGLLELEYEGFYVRGFFVTKKKYAVIDEEGKITTRGLEIVRRDWSEIAKETQARVLEAILKHGDVEEAVRIVKEVTEKLSKYEVPPEKLVIHEQITRDLRDYKATGPHVAVAKRLAARGVKIRPGTVISYIVLKGSGRIGDRAIPADEFDPTKHRYDAEYYIENQVLPAVERILKAFGYRKEDLRYQKTKQVGSGAWLKVKGKKGTEAYVEQKLISEEDLNSAVDHHHHHH

SEQ ID NO: 583 - DNA, 2409 bp, Artificial Sequence
  Description of Artificial Sequence:Thermococcus species 9degreesN-7 mutant DNA polymerase, 9degreesN mutant
atgattctcgataccgactacatcaccgagaacgggaagcccgtgataagggtcttcaagaaggagaacggcgagtttaaaatcgagtacgacagaaccttcgagccctacttctacgcccttctgaaggacgattctgcgatagaggacgtcaagaaggtaaccgcaaagaggcacggaacggttgtcaaggtgaagcgcgccgagaaggtgcagaagaagttcctcggcaggccgatagaggtctggaagctctacttcaaccatcctcaggacgtcccggcgattcgagacaggatacgcgcccaccccgctgtcgttgacatctacgagtacgacatacccttcgccaagcgctacctcatcgacaagggcctgattccgatggagggcgacgaggagcttacgatgctcgccttcgcgatcgcaaccctctatcacgagggcgaggagttcggaaccgggccgattctcatgataagctacgccgacgggagcgaggcgagggtgataacctggaagaagattgaccttccgtacgttgacgtcgtctcgaccgagaaggagatgattaagcgcttcctccgcgtcgtcagggagaaggaccccgacgtgctcatcacctacaacggcgacaacttcgacttcgcctacctgaagaagcgctgtgaggaactcggaataaagttcacactcggcagggacgggagcgagccgaagatacagcgaatgggcgaccgctttgccgttgaggtgaagggcaggattcacttcgacctctaccccgtcataaggcgcacgataaacctcccgacctacacccttgaggccgtttacgaggccgtctttggaaagcccaaggagaaggtttacgcagaggagatagcgcaggcctgggagagcggggagggccttgaaagggttgcaagatactcgatggaggacgctaaggtgacctacgagctgggaagggagttcttcccgatggaggcccagctttcgaggcttataggccagagcctctgggacgtctcgcgctcgagcaccggaaatttggtggaggcattcctcctgcggaaggcctacaagaggaacgagctcgccccaaacaagcccgacgagagggagctcgcgagacggcgcgggggctacgctggcgggtacgttaaggaaccagagcggggattgtgggacaacattgtgtatttagacttccgctcgtggtatccttcaatcatcataacccacaacgtctcgccggataccctcaaccgcgagggctgtaaagagtacgacgtcgcccctgaggttggacacaagttctgcaaggacttccccggcttcataccaagcctcctgggagatttgctcgaggaggcgagcaagatagagcggaagatgaaggcaacggttgacccgctggagaagaaactcctcgtgtacaggcagtggcttatatgtatcctcgccaacagcttctacggctactacggctacgccaaggcccggtggtactgcaaggagtgcgccgagagcgttacggcctggggaagggagtatatagaaatggttatccgggaactcgaagaaaaattcggttttaaagttctctatgccgatacagacggtctccatgctaccattcccggagcagacgctgaaacagtcaagaaaaaagcaaaggagttcttaaaatacattaatccaaaactgcccggcctgctcgaacttgagtacgagggcttctacgtgaggggcttcttcgtcacgaagaagaagtacgctgtgatagacgaggagggcaagataaccacgaggggtcttgagattgtgaggcgcgactggagcgagatagcgaaggagacccaggccagggtcttagaggcgatactcaagcacggtgacgtcgaggaggccgttaggatagtcaaggaagtgacggaaaagctgagcaagtatgaggtcccgcccgagaagctggtaatccacgagcagataacgcgcgatttgagggattacaaagccaccggcccgcacgttgccgttgcgaagaggctcgcggcgcgtggagtgaaaatccggcccggcacggtgataagctacatcgtcctaaagggctctggaaggataggcgacagggcgattccagctgatgagttcgacccgacgaagcaccgctacgatgcggaatactacatcgagaaccaggttctcccggcggtggagaggattctaaaagccttcggctatcggaaggaggatttgcgctaccagaagacgaagcaggtcggctcgggcgcgtggctgaaggtgaaggggaagaagggtaccgaagcttacgtagaacaaaaactcatctcagaagaggatctgaatagcgccgtcgaccatcatcatcatcatcattga

SEQ ID NO: 584 - protein, 802 aa, Artificial Sequence
  Description of Artificial Sequence:Thermococcus species 9degreesN-7 mutant DNA polymerase, 9degreesN mutant
MILDTDYITENGKPVIRVFKKENGEFKIEYDRTFEPYFYALLKDDSAIEDVKKVTAKRHGTVVKVKRAEKVQKKFLGRPIEVWKLYFNHPQDVPAIRDRIRAHPAVVDIYEYDIPFAKRYLIDKGLIPMEGDEELTMLAFAIATLYHEGEEFGTGPILMISYADGSEARVITWKKIDLPYVDVVSTEKEMIKRFLRVVREKDPDVLITYNGDNFDFAYLKKRCEELGIKFTLGRDGSEPKIQRMGDRFAVEVKGRIHFDLYPVIRRTINLPTYTLEAVYEAVFGKPKEKVYAEEIAQAWESGEGLERVARYSMEDAKVTYELGREFFPMEAQLSRLIGQSLWDVSRSSTGNLVEAFLLRKAYKRNELAPNKPDERELARRRGGYAGGYVKEPERGLWDNIVYLDFRSWYPSIIITHNVSPDTLNREGCKEYDVAPEVGHKFCKDFPGFIPSLLGDLLEEASKIERKMKATVDPLEKKLLVYRQWLICILANSFYGYYGYAKARWYCKECAESVTAWGREYIEMVIRELEEKFGFKVLYADTDGLHATIPGADAETVKKKAKEFLKYINPKLPGLLELEYEGFYVRGFFVTKKKYAVIDEEGKITTRGLEIVRRDWSEIAKETQARVLEAILKHGDVEEAVRIVKEVTEKLSKYEVPPEKLVIHEQITRDLRDYKATGPHVAVAKRLAARGVKIRPGTVISYIVLKGSGRIGDRAIPADEFDPTKHRYDAEYYIENQVLPAVERILKAFGYRKEDLRYQKTKQVGSGAWLKVKGKKGTEAYVEQKLISEEDLNSAVDHHHHHH

SEQ ID NO: 585 - DNA, 2409 bp, Artificial Sequence
  Description of Artificial Sequence:Thermococcus species 9degreesN-7 mutant DNA polymerase, 9degreesN mutant
atgattctcgataccgactacatcaccgagaacgggaagcccgtgataagggtcttcaagaaggagaacggcgagtttaaaatcgagtacgacagaaccttcgagccctacttctacgcccttctgaaggacgattctgcgatagaggacgtcaagaaggtaaccgcaaagaggcacggaacggttgtcaaggtgaagcgcgccgagaaggtgcagaagaagttcctcggcaggccgatagaggtctggaagctctacttcaaccatcctcaggacgtcccggcgattcgagacaggatacgcgcccaccccgctgtcgttgacatctacgagtacgacatacccttcgccaagcgctacctcatcgacaagggcctgattccgatggagggcgacgaggagcttacgatgctcgccttcgcgatcgcaaccctctatcacgagggcgaggagttcggaaccgggccgattctcatgataagctacgccgacgggagcgaggcgagggtgataacctggaagaagattgaccttccgtacgttgacgtcgtctcgaccgagaaggagatgattaagcgcttcctccgcgtcgtcagggagaaggaccccgacgtgctcatcacctacaacggcgacaacttcgacttcgcctacctgaagaagcgctgtgaggaactcggaataaagttcacactcggcagggacgggagcgagccgaagatacagcgaatgggcgaccgctttgccgttgaggtgaagggcaggattcacttcgacctctaccccgtcataaggcgcacgataaacctcccgacctacacccttgaggccgtttacgaggccgtctttggaaagcccaaggagaaggtttacgcagaggagatagcgcaggcctgggagagcggggagggccttgaaagggttgcaagatactcgatggaggacgctaaggtgacctacgagctgggaagggagttcttcccgatggaggcccagctttcgaggcttataggccagagcctctgggacgtctcgcgctcgagcaccggaaatttggtggaggcattcctcctgcggaaggcctacaagaggaacgagctcgccccaaacaagcccgacgagagggagctcgcgagacggcgcgggggctacgctggcgggtacgttaaggaaccagagcggggattgtgggacaacattgtgtatttagacttccgctcgtggtatccttcaatcatcataacccacaacgtctcgccggataccctcaaccgcgagggctgtaaagagtacgacgtcgcccctgaggttggacacaagttctgcaaggacttccccggcttcataccaagcctcctgggagatttgctcgaggaggcgagcaagatagagcggaagatgaaggcaacggttgacccgctggagaagaaactcctcgtgtacaggcagtggcttatatttatcctcgccaacagcttctacggctactacggctacgccaaggcccggtggtactgcaaggagtgcgccgagagcgttacggcctggggaagggagtatatagaaatggttatccgggaactcgaagaaaaattcggttttaaagttctctatgccgatacagacggtctccatgctaccattcccggagcagacgctgaaacagtcaagaaaaaagcaaaggagttcttaaaatacattaatccaaaactgcccggcctgctcgaacttgagtacgagggcttctacgtgaggggcttcttcgtcacgaagaagaagtacgctgtgatagacgaggagggcaagataaccacgaggggtcttgagattgtgaggcgcgactggagcgagatagcgaaggagacccaggccagggtcttagaggcgatactcaagcacggtgacgtcgaggaggccgttaggatagtcaaggaagtgacggaaaagctgagcaagtatgaggtcccgcccgagaagctggtaatccacgagcagataacgcgcgatttgagggattacaaagccaccggcccgcacgttgccgttgcgaagaggctcgcggcgcgtggagtgaaaatccggcccggcacggtgataagctacatcgtcctaaagggctctggaaggataggcgacagggcgattccagctgatgagttcgacccgacgaagcaccgctacgatgcggaatactacatcgagaaccaggttctcccggcggtggagaggattctaaaagccttcggctatcggaaggaggatttgcgctaccagaagacgaagcaggtcggctcgggcgcgtggctgaaggtgaaggggaagaagggtaccgaagcttacgtagaacaaaaactcatctcagaagaggatctgaatagcgccgtcgaccatcatcatcatcatcattga

SEQ ID NO: 586 - protein, 802 aa, Artificial Sequence
  Description of Artificial Sequence:Thermococcus species 9degreesN-7 mutant DNA polymerase, 9degreesN mutant
MILDTDYITENGKPVIRVFKKENGEFKIEYDRTFEPYFYALLKDDSAIEDVKKVTAKRHGTVVKVKRAEKVQKKFLGRPIEVWKLYFNHPQDVPAIRDRIRAHPAVVDIYEYDIPFAKRYLIDKGLIPMEGDEELTMLAFAIATLYHEGEEFGTGPILMISYADGSEARVITWKKIDLPYVDVVSTEKEMIKRFLRVVREKDPDVLITYNGDNFDFAYLKKRCEELGIKFTLGRDGSEPKIQRMGDRFAVEVKGRIHFDLYPVIRRTINLPTYTLEAVYEAVFGKPKEKVYAEEIAQAWESGEGLERVARYSMEDAKVTYELGREFFPMEAQLSRLIGQSLWDVSRSSTGNLVEAFLLRKAYKRNELAPNKPDERELARRRGGYAGGYVKEPERGLWDNIVYLDFRSWYPSIIITHNVSPDTLNREGCKEYDVAPEVGHKFCKDFPGFIPSLLGDLLEEASKIERKMKATVDPLEKKLLVYRQWLIFILANSFYGYYGYAKARWYCKECAESVTAWGREYIEMVIRELEEKFGFKVLYADTDGLHATIPGADAETVKKKAKEFLKYINPKLPGLLELEYEGFYVRGFFVTKKKYAVIDEEGKITTRGLEIVRRDWSEIAKETQARVLEAILKHGDVEEAVRIVKEVTEKLSKYEVPPEKLVIHEQITRDLRDYKATGPHVAVAKRLAARGVKIRPGTVISYIVLKGSGRIGDRAIPADEFDPTKHRYDAEYYIENQVLPAVERILKAFGYRKEDLRYQKTKQVGSGAWLKVKGKKGTEAYVEQKLISEEDLNSAVDHHHHHH

SEQ ID NO: 587 - DNA, 2409 bp, Artificial Sequence
  Description of Artificial Sequence:Thermococcus species 9degreesN-7 mutant DNA polymerase, 9degreesN mutant
atgattctcgataccgactacatcaccgagaacgggaagcccgtgataagggtcttcaagaaggagaacggcgagtttaaaatcgagtacgacagaaccttcgagccctacttctacgcccttctgaaggacgattctgcgatagaggacgtcaagaaggtaaccgcaaagaggcacggaacggttgtcaaggtgaagcgcgccgagaaggtgcagaagaagttcctcggcaggccgatagaggtctggaagctctacttcaaccatcctcaggacgtcccggcgattcgagacaggatacgcgcccaccccgctgtcgttgacatctacgagtacgacatacccttcgccaagcgctacctcatcgacaagggcctgattccgatggagggcgacgaggagcttacgatgctcgccttcgcgatcgcaaccctctatcacgagggcgaggagttcggaaccgggccgattctcatgataagctacgccgacgggagcgaggcgagggtgataacctggaagaagattgaccttccgtacgttgacgtcgtctcgaccgagaaggagatgattaagcgcttcctccgcgtcgtcagggagaaggaccccgacgtgctcatcacctacaacggcgacaacttcgacttcgcctacctgaagaagcgctgtgaggaactcggaataaagttcacactcggcagggacgggagcgagccgaagatacagcgaatgggcgaccgctttgccgttgaggtgaagggcaggattcacttcgacctctaccccgtcataaggcgcacgataaacctcccgacctacacccttgaggccgtttacgaggccgtctttggaaagcccaaggagaaggtttacgcagaggagatagcgcaggcctgggagagcggggagggccttgaaagggttgcaagatactcgatggaggacgctaaggtgacctacgagctgggaagggagttcttcccgatggaggcccagctttcgaggcttataggccagagcctctgggacgtctcgcgctcgagcaccggaaatttggtggaggcattcctcctgcggaaggcctacaagaggaacgagctcgccccaaacaagcccgacgagagggagctcgcgagacggcgcgggggctacgctggcgggtacgttaaggaaccagagcggggattgtgggacaacattgtgtatttagacttccgctcgtggtatccttcaatcatcataacccacaacgtctcgccggataccctcaaccgcgagggctgtaaagagtacgacgtcgcccctgaggttggacacaagttctgcaaggacttccccggcttcataccaagcctcctgggagatttgctcgaggaggcgagcaagatagagcggaagatgaaggcaacggttgacccgctggagaagaaactcctcgtgtacaggcagtggcttatacggatcctcgccaacagcttctacggctactacggctacgccaaggcccggtggtactgcaaggagtgcgccgagagcgttacggcctggggaagggagtatatagaaatggttatccgggaactcgaagaaaaattcggttttaaagttctctatgccgatacagacggtctccatgctaccattcccggagcagacgctgaaacagtcaagaaaaaagcaaaggagttcttaaaatacattaatccaaaactgcccggcctgctcgaacttgagtacgagggcttctacgtgaggggcttcttcgtcacgaagaagaagtacgctgtgatagacgaggagggcaagataaccacgaggggtcttgagattgtgaggcgcgactggagcgagatagcgaaggagacccaggccagggtcttagaggcgatactcaagcacggtgacgtcgaggaggccgttaggatagtcaaggaagtgacggaaaagctgagcaagtatgaggtcccgcccgagaagctggtaatccacgagcagataacgcgcgatttgagggattacaaagccaccggcccgcacgttgccgttgcgaagaggctcgcggcgcgtggagtgaaaatccggcccggcacggtgataagctacatcgtcctaaagggctctggaaggataggcgacagggcgattccagctgatgagttcgacccgacgaagcaccgctacgatgcggaatactacatcgagaaccaggttctcccggcggtggagaggattctaaaagccttcggctatcggaaggaggatttgcgctaccagaagacgaagcaggtcggctcgggcgcgtggctgaaggtgaaggggaagaagggtaccgaagcttacgtagaacaaaaactcatctcagaagaggatctgaatagcgccgtcgaccatcatcatcatcatcattga

SEQ ID NO: 588 - protein, 802 aa, Artificial Sequence
  Description of Artificial Sequence:Thermococcus species 9degreesN-7 mutant DNA polymerase, 9degreesN mutant
MILDTDYITENGKPVIRVFKKENGEFKIEYDRTFEPYFYALLKDDSAIEDVKKVTAKRHGTVVKVKRAEKVQKKFLGRPIEVWKLYFNHPQDVPAIRDRIRAHPAVVDIYEYDIPFAKRYLIDKGLIPMEGDEELTMLAFAIATLYHEGEEFGTGPILMISYADGSEARVITWKKIDLPYVDVVSTEKEMIKRFLRVVREKDPDVLITYNGDNFDFAYLKKRCEELGIKFTLGRDGSEPKIQRMGDRFAVEVKGRIHFDLYPVIRRTINLPTYTLEAVYEAVFGKPKEKVYAEEIAQAWESGEGLERVARYSMEDAKVTYELGREFFPMEAQLSRLIGQSLWDVSRSSTGNLVEAFLLRKAYKRNELAPNKPDERELARRRGGYAGGYVKEPERGLWDNIVYLDFRSWYPSIIITHNVSPDTLNREGCKEYDVAPEVGHKFCKDFPGFIPSLLGDLLEEASKIERKMKATVDPLEKKLLVYRQWLIRILANSFYGYYGYAKARWYCKECAESVTAWGREYIEMVIRELEEKFGFKVLYADTDGLHATIPGADAETVKKKAKEFLKYINPKLPGLLELEYEGFYVRGFFVTKKKYAVIDEEGKITTRGLEIVRRDWSEIAKETQARVLEAILKHGDVEEAVRIVKEVTEKLSKYEVPPEKLVIHEQITRDLRDYKATGPHVAVAKRLAARGVKIRPGTVISYIVLKGSGRIGDRAIPADEFDPTKHRYDAEYYIENQVLPAVERILKAFGYRKEDLRYQKTKQVGSGAWLKVKGKKGTEAYVEQKLISEEDLNSAVDHHHHHH

SEQ ID NO: 589 - DNA, 2409 bp, Artificial Sequence
  Description of Artificial Sequence:Thermococcus species 9degreesN-7 mutant DNA polymerase, 9degreesN mutant
atgattctcgataccgactacatcaccgagaacgggaagcccgtgataagggtcttcaagaaggagaacggcgagtttaaaatcgagtacgacagaaccttcgagccctacttctacgcccttctgaaggacgattctgcgatagaggacgtcaagaaggtaaccgcaaagaggcacggaacggttgtcaaggtgaagcgcgccgagaaggtgcagaagaagttcctcggcaggccgatagaggtctggaagctctacttcaaccatcctcaggacgtcccggcgattcgagacaggatacgcgcccaccccgctgtcgttgacatctacgagtacgacatacccttcgccaagcgctacctcatcgacaagggcctgattccgatggagggcgacgaggagcttacgatgctcgccttcgcgatcgcaaccctctatcacgagggcgaggagttcggaaccgggccgattctcatgataagctacgccgacgggagcgaggcgagggtgataacctggaagaagattgaccttccgtacgttgacgtcgtctcgaccgagaaggagatgattaagcgcttcctccgcgtcgtcagggagaaggaccccgacgtgctcatcacctacaacggcgacaacttcgacttcgcctacctgaagaagcgctgtgaggaactcggaataaagttcacactcggcagggacgggagcgagccgaagatacagcgaatgggcgaccgctttgccgttgaggtgaagggcaggattcacttcgacctctaccccgtcataaggcgcacgataaacctcccgacctacacccttgaggccgtttacgaggccgtctttggaaagcccaaggagaaggtttacgcagaggagatagcgcaggcctgggagagcggggagggccttgaaagggttgcaagatactcgatggaggacgctaaggtgacctacgagctgggaagggagttcttcccgatggaggcccagctttcgaggcttataggccagagcctctgggacgtctcgcgctcgagcaccggaaatttggtggaggcattcctcctgcggaaggcctacaagaggaacgagctcgccccaaacaagcccgacgagagggagctcgcgagacggcgcgggggctacgctggcgggtacgttaaggaaccagagcggggattgtgggacaacattgtgtatttagacttccgctcgtggtatccttcaatcatcataacccacaacgtctcgccggataccctcaaccgcgagggctgtaaagagtacgacgtcgcccctgaggttggacacaagttctgcaaggacttccccggcttcataccaagcctcctgggagatttgctcgaggaggcgagcaagatagagcggaagatgaaggcaacggttgacccgctggagaagaaactcctcgtgtacaggcagtggcttatacaaatcctcgccaacagcttctacggctactacggctacgccaaggcccggtggtactgcaaggagtgcgccgagagcgttacggcctggggaagggagtatatagaaatggttatccgggaactcgaagaaaaattcggttttaaagttctctatgccgatacagacggtctccatgctaccattcccggagcagacgctgaaacagtcaagaaaaaagcaaaggagttcttaaaatacattaatccaaaactgcccggcctgctcgaacttgagtacgagggcttctacgtgaggggcttcttcgtcacgaagaagaagtacgctgtgatagacgaggagggcaagataaccacgaggggtcttgagattgtgaggcgcgactggagcgagatagcgaaggagacccaggccagggtcttagaggcgatactcaagcacggtgacgtcgaggaggccgttaggatagtcaaggaagtgacggaaaagctgagcaagtatgaggtcccgcccgagaagctggtaatccacgagcagataacgcgcgatttgagggattacaaagccaccggcccgcacgttgccgttgcgaagaggctcgcggcgcgtggagtgaaaatccggcccggcacggtgataagctacatcgtcctaaagggctctggaaggataggcgacagggcgattccagctgatgagttcgacccgacgaagcaccgctacgatgcggaatactacatcgagaaccaggttctcccggcggtggagaggattctaaaagccttcggctatcggaaggaggatttgcgctaccagaagacgaagcaggtcggctcgggcgcgtggctgaaggtgaaggggaagaagggtaccgaagcttacgtagaacaaaaactcatctcagaagaggatctgaatagcgccgtcgaccatcatcatcatcatcattga

SEQ ID NO: 590 - protein, 802 aa, Artificial Sequence
  Description of Artificial Sequence:Thermococcus species 9degreesN-7 mutant DNA polymerase, 9degreesN mutant
MILDTDYITENGKPVIRVFKKENGEFKIEYDRTFEPYFYALLKDDSAIEDVKKVTAKRHGTVVKVKRAEKVQKKFLGRPIEVWKLYFNHPQDVPAIRDRIRAHPAVVDIYEYDIPFAKRYLIDKGLIPMEGDEELTMLAFAIATLYHEGEEFGTGPILMISYADGSEARVITWKKIDLPYVDVVSTEKEMIKRFLRVVREKDPDVLITYNGDNFDFAYLKKRCEELGIKFTLGRDGSEPKIQRMGDRFAVEVKGRIHFDLYPVIRRTINLPTYTLEAVYEAVFGKPKEKVYAEEIAQAWESGEGLERVARYSMEDAKVTYELGREFFPMEAQLSRLIGQSLWDVSRSSTGNLVEAFLLRKAYKRNELAPNKPDERELARRRGGYAGGYVKEPERGLWDNIVYLDFRSWYPSIIITHNVSPDTLNREGCKEYDVAPEVGHKFCKDFPGFIPSLLGDLLEEASKIERKMKATVDPLEKKLLVYRQWLIQILANSFYGYYGYAKARWYCKECAESVTAWGREYIEMVIRELEEKFGFKVLYADTDGLHATIPGADAETVKKKAKEFLKYINPKLPGLLELEYEGFYVRGFFVTKKKYAVIDEEGKITTRGLEIVRRDWSEIAKETQARVLEAILKHGDVEEAVRIVKEVTEKLSKYEVPPEKLVIHEQITRDLRDYKATGPHVAVAKRLAARGVKIRPGTVISYIVLKGSGRIGDRAIPADEFDPTKHRYDAEYYIENQVLPAVERILKAFGYRKEDLRYQKTKQVGSGAWLKVKGKKGTEAYVEQKLISEEDLNSAVDHHHHHH

SEQ ID NO: 591 - DNA, 2409 bp, Artificial Sequence
  Description of Artificial Sequence:Thermococcus species 9degreesN-7 mutant DNA polymerase, 9degreesN mutant
atgattctcgataccgactacatcaccgagaacgggaagcccgtgataagggtcttcaagaaggagaacggcgagtttaaaatcgagtacgacagaaccttcgagccctacttctacgcccttctgaaggacgattctgcgatagaggacgtcaagaaggtaaccgcaaagaggcacggaacggttgtcaaggtgaagcgcgccgagaaggtgcagaagaagttcctcggcaggccgatagaggtctggaagctctacttcaaccatcctcaggacgtcccggcgattcgagacaggatacgcgcccaccccgctgtcgttgacatctacgagtacgacatacccttcgccaagcgctacctcatcgacaagggcctgattccgatggagggcgacgaggagcttacgatgctcgccttcgcgatcgcaaccctctatcacgagggcgaggagttcggaaccgggccgattctcatgataagctacgccgacgggagcgaggcgagggtgataacctggaagaagattgaccttccgtacgttgacgtcgtctcgaccgagaaggagatgattaagcgcttcctccgcgtcgtcagggagaaggaccccgacgtgctcatcacctacaacggcgacaacttcgacttcgcctacctgaagaagcgctgtgaggaactcggaataaagttcacactcggcagggacgggagcgagccgaagatacagcgaatgggcgaccgctttgccgttgaggtgaagggcaggattcacttcgacctctaccccgtcataaggcgcacgataaacctcccgacctacacccttgaggccgtttacgaggccgtctttggaaagcccaaggagaaggtttacgcagaggagatagcgcaggcctgggagagcggggagggccttgaaagggttgcaagatactcgatggaggacgctaaggtgacctacgagctgggaagggagttcttcccgatggaggcccagctttcgaggcttataggccagagcctctgggacgtctcgcgctcgagcaccggaaatttggtggaggcattcctcctgcggaaggcctacaagaggaacgagctcgccccaaacaagcccgacgagagggagctcgcgagacggcgcgggggctacgctggcgggtacgttaaggaaccagagcggggattgtgggacaacattgtgtatttagacttccgctcgtggtatccttcaatcatcataacccacaacgtctcgccggataccctcaaccgcgagggctgtaaagagtacgacgtcgcccctgaggttggacacaagttctgcaaggacttccccggcttcataccaagcctcctgggagatttgctcgaggaggcgagcaagatagagcggaagatgaaggcaacggttgacccgctggagaagaaactcctcgtgtacaggcagtggcttataccaatcctcgccaacagcttctacggctactacggctacgccaaggcccggtggtactgcaaggagtgcgccgagagcgttacggcctggggaagggagtatatagaaatggttatccgggaactcgaagaaaaattcggttttaaagttctctatgccgatacagacggtctccatgctaccattcccggagcagacgctgaaacagtcaagaaaaaagcaaaggagttcttaaaatacattaatccaaaactgcccggcctgctcgaacttgagtacgagggcttctacgtgaggggcttcttcgtcacgaagaagaagtacgctgtgatagacgaggagggcaagataaccacgaggggtcttgagattgtgaggcgcgactggagcgagatagcgaaggagacccaggccagggtcttagaggcgatactcaagcacggtgacgtcgaggaggccgttaggatagtcaaggaagtgacggaaaagctgagcaagtatgaggtcccgcccgagaagctggtaatccacgagcagataacgcgcgatttgagggattacaaagccaccggcccgcacgttgccgttgcgaagaggctcgcggcgcgtggagtgaaaatccggcccggcacggtgataagctacatcgtcctaaagggctctggaaggataggcgacagggcgattccagctgatgagttcgacccgacgaagcaccgctacgatgcggaatactacatcgagaaccaggttctcccggcggtggagaggattctaaaagccttcggctatcggaaggaggatttgcgctaccagaagacgaagcaggtcggctcgggcgcgtggctgaaggtgaaggggaagaagggtaccgaagcttacgtagaacaaaaactcatctcagaagaggatctgaatagcgccgtcgaccatcatcatcatcatcattga

SEQ ID NO: 592 - protein, 802 aa, Artificial Sequence
  Description of Artificial Sequence:Thermococcus species 9degreesN-7 mutant DNA polymerase, 9degreesN mutant
MILDTDYITENGKPVIRVFKKENGEFKIEYDRTFEPYFYALLKDDSAIEDVKKVTAKRHGTVVKVKRAEKVQKKFLGRPIEVWKLYFNHPQDVPAIRDRIRAHPAVVDIYEYDIPFAKRYLIDKGLIPMEGDEELTMLAFAIATLYHEGEEFGTGPILMISYADGSEARVITWKKIDLPYVDVVSTEKEMIKRFLRVVREKDPDVLITYNGDNFDFAYLKKRCEELGIKFTLGRDGSEPKIQRMGDRFAVEVKGRIHFDLYPVIRRTINLPTYTLEAVYEAVFGKPKEKVYAEEIAQAWESGEGLERVARYSMEDAKVTYELGREFFPMEAQLSRLIGQSLWDVSRSSTGNLVEAFLLRKAYKRNELAPNKPDERELARRRGGYAGGYVKEPERGLWDNIVYLDFRSWYPSIIITHNVSPDTLNREGCKEYDVAPEVGHKFCKDFPGFIPSLLGDLLEEASKIERKMKATVDPLEKKLLVYRQWLIPILANSFYGYYGYAKARWYCKECAESVTAWGREYIEMVIRELEEKFGFKVLYADTDGLHATIPGADAETVKKKAKEFLKYINPKLPGLLELEYEGFYVRGFFVTKKKYAVIDEEGKITTRGLEIVRRDWSEIAKETQARVLEAILKHGDVEEAVRIVKEVTEKLSKYEVPPEKLVIHEQITRDLRDYKATGPHVAVAKRLAARGVKIRPGTVISYIVLKGSGRIGDRAIPADEFDPTKHRYDAEYYIENQVLPAVERILKAFGYRKEDLRYQKTKQVGSGAWLKVKGKKGTEAYVEQKLISEEDLNSAVDHHHHHH

SEQ ID NO: 593 - DNA, 2409 bp, Artificial Sequence
  Description of Artificial Sequence:Thermococcus species 9degreesN-7 mutant DNA polymerase, 9degreesN mutant
atgattctcgataccgactacatcaccgagaacgggaagcccgtgataagggtcttcaagaaggagaacggcgagtttaaaatcgagtacgacagaaccttcgagccctacttctacgcccttctgaaggacgattctgcgatagaggacgtcaagaaggtaaccgcaaagaggcacggaacggttgtcaaggtgaagcgcgccgagaaggtgcagaagaagttcctcggcaggccgatagaggtctggaagctctacttcaaccatcctcaggacgtcccggcgattcgagacaggatacgcgcccaccccgctgtcgttgacatctacgagtacgacatacccttcgccaagcgctacctcatcgacaagggcctgattccgatggagggcgacgaggagcttacgatgctcgccttcgcgatcgcaaccctctatcacgagggcgaggagttcggaaccgggccgattctcatgataagctacgccgacgggagcgaggcgagggtgataacctggaagaagattgaccttccgtacgttgacgtcgtctcgaccgagaaggagatgattaagcgcttcctccgcgtcgtcagggagaaggaccccgacgtgctcatcacctacaacggcgacaacttcgacttcgcctacctgaagaagcgctgtgaggaactcggaataaagttcacactcggcagggacgggagcgagccgaagatacagcgaatgggcgaccgctttgccgttgaggtgaagggcaggattcacttcgacctctaccccgtcataaggcgcacgataaacctcccgacctacacccttgaggccgtttacgaggccgtctttggaaagcccaaggagaaggtttacgcagaggagatagcgcaggcctgggagagcggggagggccttgaaagggttgcaagatactcgatggaggacgctaaggtgacctacgagctgggaagggagttcttcccgatggaggcccagctttcgaggcttataggccagagcctctgggacgtctcgcgctcgagcaccggaaatttggtggaggcattcctcctgcggaaggcctacaagaggaacgagctcgccccaaacaagcccgacgagagggagctcgcgagacggcgcgggggctacgctggcgggtacgttaaggaaccagagcggggattgtgggacaacattgtgtatttagacttccgctcgtggtatccttcaatcatcataacccacaacgtctcgccggataccctcaaccgcgagggctgtaaagagtacgacgtcgcccctgaggttggacacaagttctgcaaggacttccccggcttcataccaagcctcctgggagatttgctcgaggaggcgagcaagatagagcggaagatgaaggcaacggttgacccgctggagaagaaactcctcgtgtacaggcagtggcttatatggatcctcgccaacagcttctacggctactacggctacgccaaggcccggtggtactgcaaggagtgcgccgagagcgttacggcctggggaagggagtatatagaaatggttatccgggaactcgaagaaaaattcggttttaaagttctctatgccgatacagacggtctccatgctaccattcccggagcagacgctgaaacagtcaagaaaaaagcaaaggagttcttaaaatacattaatccaaaactgcccggcctgctcgaacttgagtacgagggcttctacgtgaggggcttcttcgtcacgaagaagaagtacgctgtgatagacgaggagggcaagataaccacgaggggtcttgagattgtgaggcgcgactggagcgagatagcgaaggagacccaggccagggtcttagaggcgatactcaagcacggtgacgtcgaggaggccgttaggatagtcaaggaagtgacggaaaagctgagcaagtatgaggtcccgcccgagaagctggtaatccacgagcagataacgcgcgatttgagggattacaaagccaccggcccgcacgttgccgttgcgaagaggctcgcggcgcgtggagtgaaaatccggcccggcacggtgataagctacatcgtcctaaagggctctggaaggataggcgacagggcgattccagctgatgagttcgacccgacgaagcaccgctacgatgcggaatactacatcgagaaccaggttctcccggcggtggagaggattctaaaagccttcggctatcggaaggaggatttgcgctaccagaagacgaagcaggtcggctcgggcgcgtggctgaaggtgaaggggaagaagggtaccgaagcttacgtagaacaaaaactcatctcagaagaggatctgaatagcgccgtcgaccatcatcatcatcatcattga

SEQ ID NO: 594 - protein, 802 aa, Artificial Sequence
  Description of Artificial Sequence:Thermococcus species 9degreesN-7 mutant DNA polymerase, 9degreesN mutant
MILDTDYITENGKPVIRVFKKENGEFKIEYDRTFEPYFYALLKDDSAIEDVKKVTAKRHGTVVKVKRAEKVQKKFLGRPIEVWKLYFNHPQDVPAIRDRIRAHPAVVDIYEYDIPFAKRYLIDKGLIPMEGDEELTMLAFAIATLYHEGEEFGTGPILMISYADGSEARVITWKKIDLPYVDVVSTEKEMIKRFLRVVREKDPDVLITYNGDNFDFAYLKKRCEELGIKFTLGRDGSEPKIQRMGDRFAVEVKGRIHFDLYPVIRRTINLPTYTLEAVYEAVFGKPKEKVYAEEIAQAWESGEGLERVARYSMEDAKVTYELGREFFPMEAQLSRLIGQSLWDVSRSSTGNLVEAFLLRKAYKRNELAPNKPDERELARRRGGYAGGYVKEPERGLWDNIVYLDFRSWYPSIIITHNVSPDTLNREGCKEYDVAPEVGHKFCKDFPGFIPSLLGDLLEEASKIERKMKATVDPLEKKLLVYRQWLIWILANSFYGYYGYAKARWYCKECAESVTAWGREYIEMVIRELEEKFGFKVLYADTDGLHATIPGADAETVKKKAKEFLKYINPKLPGLLELEYEGFYVRGFFVTKKKYAVIDEEGKITTRGLEIVRRDWSEIAKETQARVLEAILKHGDVEEAVRIVKEVTEKLSKYEVPPEKLVIHEQITRDLRDYKATGPHVAVAKRLAARGVKIRPGTVISYIVLKGSGRIGDRAIPADEFDPTKHRYDAEYYIENQVLPAVERILKAFGYRKEDLRYQKTKQVGSGAWLKVKGKKGTEAYVEQKLISEEDLNSAVDHHHHHH

SEQ ID NO: 595 - DNA, 2409 bp, Artificial Sequence
  Description of Artificial Sequence:Thermococcus species 9degreesN-7 mutant DNA polymerase, 9degreesN mutant
atgattctcgataccgactacatcaccgagaacgggaagcccgtgataagggtcttcaagaaggagaacggcgagtttaaaatcgagtacgacagaaccttcgagccctacttctacgcccttctgaaggacgattctgcgatagaggacgtcaagaaggtaaccgcaaagaggcacggaacggttgtcaaggtgaagcgcgccgagaaggtgcagaagaagttcctcggcaggccgatagaggtctggaagctctacttcaaccatcctcaggacgtcccggcgattcgagacaggatacgcgcccaccccgctgtcgttgacatctacgagtacgacatacccttcgccaagcgctacctcatcgacaagggcctgattccgatggagggcgacgaggagcttacgatgctcgccttcgcgatcgcaaccctctatcacgagggcgaggagttcggaaccgggccgattctcatgataagctacgccgacgggagcgaggcgagggtgataacctggaagaagattgaccttccgtacgttgacgtcgtctcgaccgagaaggagatgattaagcgcttcctccgcgtcgtcagggagaaggaccccgacgtgctcatcacctacaacggcgacaacttcgacttcgcctacctgaagaagcgctgtgaggaactcggaataaagttcacactcggcagggacgggagcgagccgaagatacagcgaatgggcgaccgctttgccgttgaggtgaagggcaggattcacttcgacctctaccccgtcataaggcgcacgataaacctcccgacctacacccttgaggccgtttacgaggccgtctttggaaagcccaaggagaaggtttacgcagaggagatagcgcaggcctgggagagcggggagggccttgaaagggttgcaagatactcgatggaggacgctaaggtgacctacgagctgggaagggagttcttcccgatggaggcccagctttcgaggcttataggccagagcctctgggacgtctcgcgctcgagcaccggaaatttggtggaggcattcctcctgcggaaggcctacaagaggaacgagctcgccccaaacaagcccgacgagagggagctcgcgagacggcgcgggggctacgctggcgggtacgttaaggaaccagagcggggattgtgggacaacattgtgtatttagacttccgctcgtggtatccttcaatcatcataacccacaacgtctcgccggataccctcaaccgcgagggctgtaaagagtacgacgtcgcccctgaggttggacacaagttctgcaaggacttccccggcttcataccaagcctcctgggagatttgctcgaggaggcgagcaagatagagcggaagatgaaggcaacggttgacccgctggagaagaaactcctcgtgtacaggcagtggcttatagctatcctcgccaacagcttctacggctactacggctacgccaaggcccggtggtactgcaaggagtgcgccgagagcgttacggcctggggaagggagtatatagaaatggttatccgggaactcgaagaaaaattcggttttaaagttctctatgccgatacagacggtctccatgctaccattcccggagcagacgctgaaacagtcaagaaaaaagcaaaggagttcttaaaatacattaatccaaaactgcccggcctgctcgaacttgagtacgagggcttctacgtgaggggcttcttcgtcacgaagaagaagtacgctgtgatagacgaggagggcaagataaccacgaggggtcttgagattgtgaggcgcgactggagcgagatagcgaaggagacccaggccagggtcttagaggcgatactcaagcacggtgacgtcgaggaggccgttaggatagtcaaggaagtgacggaaaagctgagcaagtatgaggtcccgcccgagaagctggtaatccacgagcagataacgcgcgatttgagggattacaaagccaccggcccgcacgttgccgttgcgaagaggctcgcggcgcgtggagtgaaaatccggcccggcacggtgataagctacatcgtcctaaagggctctggaaggataggcgacagggcgattccagctgatgagttcgacccgacgaagcaccgctacgatgcggaatactacatcgagaaccaggttctcccggcggtggagaggattctaaaagccttcggctatcggaaggaggatttgcgctaccagaagacgaagcaggtcggctcgggcgcgtggctgaaggtgaaggggaagaagggtaccgaagcttacgtagaacaaaaactcatctcagaagaggatctgaatagcgccgtcgaccatcatcatcatcatcattga

SEQ ID NO: 596 - protein, 802 aa, Artificial Sequence
  Description of Artificial Sequence:Thermococcus species 9degreesN-7 mutant DNA polymerase, 9degreesN mutant
MILDTDYITENGKPVIRVFKKENGEFKIEYDRTFEPYFYALLKDDSAIEDVKKVTAKRHGTVVKVKRAEKVQKKFLGRPIEVWKLYFNHPQDVPAIRDRIRAHPAVVDIYEYDIPFAKRYLIDKGLIPMEGDEELTMLAFAIATLYHEGEEFGTGPILMISYADGSEARVITWKKIDLPYVDVVSTEKEMIKRFLRVVREKDPDVLITYNGDNFDFAYLKKRCEELGIKFTLGRDGSEPKIQRMGDRFAVEVKGRIHFDLYPVIRRTINLPTYTLEAVYEAVFGKPKEKVYAEEIAQAWESGEGLERVARYSMEDAKVTYELGREFFPMEAQLSRLIGQSLWDVSRSSTGNLVEAFLLRKAYKRNELAPNKPDERELARRRGGYAGGYVKEPERGLWDNIVYLDFRSWYPSIIITHNVSPDTLNREGCKEYDVAPEVGHKFCKDFPGFIPSLLGDLLEEASKIERKMKATVDPLEKKLLVYRQWLIAILANSFYGYYGYAKARWYCKECAESVTAWGREYIEMVIRELEEKFGFKVLYADTDGLHATIPGADAETVKKKAKEFLKYINPKLPGLLELEYEGFYVRGFFVTKKKYAVIDEEGKITTRGLEIVRRDWSEIAKETQARVLEAILKHGDVEEAVRIVKEVTEKLSKYEVPPEKLVIHEQITRDLRDYKATGPHVAVAKRLAARGVKIRPGTVISYIVLKGSGRIGDRAIPADEFDPTKHRYDAEYYIENQVLPAVERILKAFGYRKEDLRYQKTKQVGSGAWLKVKGKKGTEAYVEQKLISEEDLNSAVDHHHHHH

SEQ ID NO: 597 - DNA, 2409 bp, Artificial Sequence
  Description of Artificial Sequence:Thermococcus species 9degreesN-7 mutant DNA polymerase, 9degreesN mutant
atgattctcgataccgactacatcaccgagaacgggaagcccgtgataagggtcttcaagaaggagaacggcgagtttaaaatcgagtacgacagaaccttcgagccctacttctacgcccttctgaaggacgattctgcgatagaggacgtcaagaaggtaaccgcaaagaggcacggaacggttgtcaaggtgaagcgcgccgagaaggtgcagaagaagttcctcggcaggccgatagaggtctggaagctctacttcaaccatcctcaggacgtcccggcgattcgagacaggatacgcgcccaccccgctgtcgttgacatctacgagtacgacatacccttcgccaagcgctacctcatcgacaagggcctgattccgatggagggcgacgaggagcttacgatgctcgccttcgcgatcgcaaccctctatcacgagggcgaggagttcggaaccgggccgattctcatgataagctacgccgacgggagcgaggcgagggtgataacctggaagaagattgaccttccgtacgttgacgtcgtctcgaccgagaaggagatgattaagcgcttcctccgcgtcgtcagggagaaggaccccgacgtgctcatcacctacaacggcgacaacttcgacttcgcctacctgaagaagcgctgtgaggaactcggaataaagttcacactcggcagggacgggagcgagccgaagatacagcgaatgggcgaccgctttgccgttgaggtgaagggcaggattcacttcgacctctaccccgtcataaggcgcacgataaacctcccgacctacacccttgaggccgtttacgaggccgtctttggaaagcccaaggagaaggtttacgcagaggagatagcgcaggcctgggagagcggggagggccttgaaagggttgcaagatactcgatggaggacgctaaggtgacctacgagctgggaagggagttcttcccgatggaggcccagctttcgaggcttataggccagagcctctgggacgtctcgcgctcgagcaccggaaatttggtggaggcattcctcctgcggaaggcctacaagaggaacgagctcgccccaaacaagcccgacgagagggagctcgcgagacggcgcgggggctacgctggcgggtacgttaaggaaccagagcggggattgtgggacaacattgtgtatttagacttccgctcgtggtatccttcaatcatcataacccacaacgtctcgccggataccctcaaccgcgagggctgtaaagagtacgacgtcgcccctgaggttggacacaagttctgcaaggacttccccggcttcataccaagcctcctgggagatttgctcgaggaggcgagcaagatagagcggaagatgaaggcaacggttgacccgctggagaagaaactcctcgtgtacaggcagtggcttatagaaatcctcgccaacagcttctacggctactacggctacgccaaggcccggtggtactgcaaggagtgcgccgagagcgttacggcctggggaagggagtatatagaaatggttatccgggaactcgaagaaaaattcggttttaaagttctctatgccgatacagacggtctccatgctaccattcccggagcagacgctgaaacagtcaagaaaaaagcaaaggagttcttaaaatacattaatccaaaactgcccggcctgctcgaacttgagtacgagggcttctacgtgaggggcttcttcgtcacgaagaagaagtacgctgtgatagacgaggagggcaagataaccacgaggggtcttgagattgtgaggcgcgactggagcgagatagcgaaggagacccaggccagggtcttagaggcgatactcaagcacggtgacgtcgaggaggccgttaggatagtcaaggaagtgacggaaaagctgagcaagtatgaggtcccgcccgagaagctggtaatccacgagcagataacgcgcgatttgagggattacaaagccaccggcccgcacgttgccgttgcgaagaggctcgcggcgcgtggagtgaaaatccggcccggcacggtgataagctacatcgtcctaaagggctctggaaggataggcgacagggcgattccagctgatgagttcgacccgacgaagcaccgctacgatgcggaatactacatcgagaaccaggttctcccggcggtggagaggattctaaaagccttcggctatcggaaggaggatttgcgctaccagaagacgaagcaggtcggctcgggcgcgtggctgaaggtgaaggggaagaagggtaccgaagcttacgtagaacaaaaactcatctcagaagaggatctgaatagcgccgtcgaccatcatcatcatcatcattga

SEQ ID NO: 598 - protein, 802 aa, Artificial Sequence
  Description of Artificial Sequence:Thermococcus species 9degreesN-7 mutant DNA polymerase, 9degreesN mutant
MILDTDYITENGKPVIRVFKKENGEFKIEYDRTFEPYFYALLKDDSAIEDVKKVTAKRHGTVVKVKRAEKVQKKFLGRPIEVWKLYFNHPQDVPAIRDRIRAHPAVVDIYEYDIPFAKRYLIDKGLIPMEGDEELTMLAFAIATLYHEGEEFGTGPILMISYADGSEARVITWKKIDLPYVDVVSTEKEMIKRFLRVVREKDPDVLITYNGDNFDFAYLKKRCEELGIKFTLGRDGSEPKIQRMGDRFAVEVKGRIHFDLYPVIRRTINLPTYTLEAVYEAVFGKPKEKVYAEEIAQAWESGEGLERVARYSMEDAKVTYELGREFFPMEAQLSRLIGQSLWDVSRSSTGNLVEAFLLRKAYKRNELAPNKPDERELARRRGGYAGGYVKEPERGLWDNIVYLDFRSWYPSIIITHNVSPDTLNREGCKEYDVAPEVGHKFCKDFPGFIPSLLGDLLEEASKIERKMKATVDPLEKKLLVYRQWLIEILANSFYGYYGYAKARWYCKECAESVTAWGREYIEMVIRELEEKFGFKVLYADTDGLHATIPGADAETVKKKAKEFLKYINPKLPGLLELEYEGFYVRGFFVTKKKYAVIDEEGKITTRGLEIVRRDWSEIAKETQARVLEAILKHGDVEEAVRIVKEVTEKLSKYEVPPEKLVIHEQITRDLRDYKATGPHVAVAKRLAARGVKIRPGTVISYIVLKGSGRIGDRAIPADEFDPTKHRYDAEYYIENQVLPAVERILKAFGYRKEDLRYQKTKQVGSGAWLKVKGKKGTEAYVEQKLISEEDLNSAVDHHHHHH

SEQ ID NO: 599 - DNA, 2409 bp, Artificial Sequence
  Description of Artificial Sequence:Thermococcus species 9degreesN-7 mutant DNA polymerase, 9degreesN mutant
atgattctcgataccgactacatcaccgagaacgggaagcccgtgataagggtcttcaagaaggagaacggcgagtttaaaatcgagtacgacagaaccttcgagccctacttctacgcccttctgaaggacgattctgcgatagaggacgtcaagaaggtaaccgcaaagaggcacggaacggttgtcaaggtgaagcgcgccgagaaggtgcagaagaagttcctcggcaggccgatagaggtctggaagctctacttcaaccatcctcaggacgtcccggcgattcgagacaggatacgcgcccaccccgctgtcgttgacatctacgagtacgacatacccttcgccaagcgctacctcatcgacaagggcctgattccgatggagggcgacgaggagcttacgatgctcgccttcgcgatcgcaaccctctatcacgagggcgaggagttcggaaccgggccgattctcatgataagctacgccgacgggagcgaggcgagggtgataacctggaagaagattgaccttccgtacgttgacgtcgtctcgaccgagaaggagatgattaagcgcttcctccgcgtcgtcagggagaaggaccccgacgtgctcatcacctacaacggcgacaacttcgacttcgcctacctgaagaagcgctgtgaggaactcggaataaagttcacactcggcagggacgggagcgagccgaagatacagcgaatgggcgaccgctttgccgttgaggtgaagggcaggattcacttcgacctctaccccgtcataaggcgcacgataaacctcccgacctacacccttgaggccgtttacgaggccgtctttggaaagcccaaggagaaggtttacgcagaggagatagcgcaggcctgggagagcggggagggccttgaaagggttgcaagatactcgatggaggacgctaaggtgacctacgagctgggaagggagttcttcccgatggaggcccagctttcgaggcttataggccagagcctctgggacgtctcgcgctcgagcaccggaaatttggtggaggcattcctcctgcggaaggcctacaagaggaacgagctcgccccaaacaagcccgacgagagggagctcgcgagacggcgcgggggctacgctggcgggtacgttaaggaaccagagcggggattgtgggacaacattgtgtatttagacttccgctcgtggtatccttcaatcatcataacccacaacgtctcgccggataccctcaaccgcgagggctgtaaagagtacgacgtcgcccctgaggttggacacaagttctgcaaggacttccccggcttcataccaagcctcctgggagatttgctcgaggaggcgagcaagatagagcggaagatgaaggcaacggttgacccgctggagaagaaactcctcgtgtacaggcagtggcttatagtaatcctcgccaacagcttctacggctactacggctacgccaaggcccggtggtactgcaaggagtgcgccgagagcgttacggcctggggaagggagtatatagaaatggttatccgggaactcgaagaaaaattcggttttaaagttctctatgccgatacagacggtctccatgctaccattcccggagcagacgctgaaacagtcaagaaaaaagcaaaggagttcttaaaatacattaatccaaaactgcccggcctgctcgaacttgagtacgagggcttctacgtgaggggcttcttcgtcacgaagaagaagtacgctgtgatagacgaggagggcaagataaccacgaggggtcttgagattgtgaggcgcgactggagcgagatagcgaaggagacccaggccagggtcttagaggcgatactcaagcacggtgacgtcgaggaggccgttaggatagtcaaggaagtgacggaaaagctgagcaagtatgaggtcccgcccgagaagctggtaatccacgagcagataacgcgcgatttgagggattacaaagccaccggcccgcacgttgccgttgcgaagaggctcgcggcgcgtggagtgaaaatccggcccggcacggtgataagctacatcgtcctaaagggctctggaaggataggcgacagggcgattccagctgatgagttcgacccgacgaagcaccgctacgatgcggaatactacatcgagaaccaggttctcccggcggtggagaggattctaaaagccttcggctatcggaaggaggatttgcgctaccagaagacgaagcaggtcggctcgggcgcgtggctgaaggtgaaggggaagaagggtaccgaagcttacgtagaacaaaaactcatctcagaagaggatctgaatagcgccgtcgaccatcatcatcatcatcattga

SEQ ID NO: 600 - protein, 802 aa, Artificial Sequence
  Description of Artificial Sequence:Thermococcus species 9degreesN-7 mutant DNA polymerase, 9degreesN mutant
MILDTDYITENGKPVIRVFKKENGEFKIEYDRTFEPYFYALLKDDSAIEDVKKVTAKRHGTVVKVKRAEKVQKKFLGRPIEVWKLYFNHPQDVPAIRDRIRAHPAVVDIYEYDIPFAKRYLIDKGLIPMEGDEELTMLAFAIATLYHEGEEFGTGPILMISYADGSEARVITWKKIDLPYVDVVSTEKEMIKRFLRVVREKDPDVLITYNGDNFDFAYLKKRCEELGIKFTLGRDGSEPKIQRMGDRFAVEVKGRIHFDLYPVIRRTINLPTYTLEAVYEAVFGKPKEKVYAEEIAQAWESGEGLERVARYSMEDAKVTYELGREFFPMEAQLSRLIGQSLWDVSRSSTGNLVEAFLLRKAYKRNELAPNKPDERELARRRGGYAGGYVKEPERGLWDNIVYLDFRSWYPSIIITHNVSPDTLNREGCKEYDVAPEVGHKFCKDFPGFIPSLLGDLLEEASKIERKMKATVDPLEKKLLVYRQWLIVILANSFYGYYGYAKARWYCKECAESVTAWGREYIEMVIRELEEKFGFKVLYADTDGLHATIPGADAETVKKKAKEFLKYINPKLPGLLELEYEGFYVRGFFVTKKKYAVIDEEGKITTRGLEIVRRDWSEIAKETQARVLEAILKHGDVEEAVRIVKEVTEKLSKYEVPPEKLVIHEQITRDLRDYKATGPHVAVAKRLAARGVKIRPGTVISYIVLKGSGRIGDRAIPADEFDPTKHRYDAEYYIENQVLPAVERILKAFGYRKEDLRYQKTKQVGSGAWLKVKGKKGTEAYVEQKLISEEDLNSAVDHHHHHH

SEQ ID NO: 601 - DNA, 2409 bp, Artificial Sequence
  Description of Artificial Sequence:Thermococcus species 9degreesN-7 mutant DNA polymerase, 9degreesN mutant
atgattctcgataccgactacatcaccgagaacgggaagcccgtgataagggtcttcaagaaggagaacggcgagtttaaaatcgagtacgacagaaccttcgagccctacttctacgcccttctgaaggacgattctgcgatagaggacgtcaagaaggtaaccgcaaagaggcacggaacggttgtcaaggtgaagcgcgccgagaaggtgcagaagaagttcctcggcaggccgatagaggtctggaagctctacttcaaccatcctcaggacgtcccggcgattcgagacaggatacgcgcccaccccgctgtcgttgacatctacgagtacgacatacccttcgccaagcgctacctcatcgacaagggcctgattccgatggagggcgacgaggagcttacgatgctcgccttcgcgatcgcaaccctctatcacgagggcgaggagttcggaaccgggccgattctcatgataagctacgccgacgggagcgaggcgagggtgataacctggaagaagattgaccttccgtacgttgacgtcgtctcgaccgagaaggagatgattaagcgcttcctccgcgtcgtcagggagaaggaccccgacgtgctcatcacctacaacggcgacaacttcgacttcgcctacctgaagaagcgctgtgaggaactcggaataaagttcacactcggcagggacgggagcgagccgaagatacagcgaatgggcgaccgctttgccgttgaggtgaagggcaggattcacttcgacctctaccccgtcataaggcgcacgataaacctcccgacctacacccttgaggccgtttacgaggccgtctttggaaagcccaaggagaaggtttacgcagaggagatagcgcaggcctgggagagcggggagggccttgaaagggttgcaagatactcgatggaggacgctaaggtgacctacgagctgggaagggagttcttcccgatggaggcccagctttcgaggcttataggccagagcctctgggacgtctcgcgctcgagcaccggaaatttggtggaggcattcctcctgcggaaggcctacaagaggaacgagctcgccccaaacaagcccgacgagagggagctcgcgagacggcgcgggggctacgctggcgggtacgttaaggaaccagagcggggattgtgggacaacattgtgtatttagacttccgctcgtggtatccttcaatcatcataacccacaacgtctcgccggataccctcaaccgcgagggctgtaaagagtacgacgtcgcccctgaggttggacacaagttctgcaaggacttccccggcttcataccaagcctcctgggagatttgctcgaggaggcgagcaagatagagcggaagatgaaggcaacggttgacccgctggagaagaaactcctcgtgtacaggcagtggcttatatacatcctcgccaacagcttctacggctactacggctacgccaaggcccggtggtactgcaaggagtgcgccgagagcgttacggcctggggaagggagtatatagaaatggttatccgggaactcgaagaaaaattcggttttaaagttctctatgccgatacagacggtctccatgctaccattcccggagcagacgctgaaacagtcaagaaaaaagcaaaggagttcttaaaatacattaatccaaaactgcccggcctgctcgaacttgagtacgagggcttctacgtgaggggcttcttcgtcacgaagaagaagtacgctgtgatagacgaggagggcaagataaccacgaggggtcttgagattgtgaggcgcgactggagcgagatagcgaaggagacccaggccagggtcttagaggcgatactcaagcacggtgacgtcgaggaggccgttaggatagtcaaggaagtgacggaaaagctgagcaagtatgaggtcccgcccgagaagctggtaatccacgagcagataacgcgcgatttgagggattacaaagccaccggcccgcacgttgccgttgcgaagaggctcgcggcgcgtggagtgaaaatccggcccggcacggtgataagctacatcgtcctaaagggctctggaaggataggcgacagggcgattccagctgatgagttcgacccgacgaagcaccgctacgatgcggaatactacatcgagaaccaggttctcccggcggtggagaggattctaaaagccttcggctatcggaaggaggatttgcgctaccagaagacgaagcaggtcggctcgggcgcgtggctgaaggtgaaggggaagaagggtaccgaagcttacgtagaacaaaaactcatctcagaagaggatctgaatagcgccgtcgaccatcatcatcatcatcattga

SEQ ID NO: 602 - protein, 802 aa, Artificial Sequence
  Description of Artificial Sequence:Thermococcus species 9degreesN-7 mutant DNA polymerase, 9degreesN mutant
MILDTDYITENGKPVIRVFKKENGEFKIEYDRTFEPYFYALLKDDSAIEDVKKVTAKRHGTVVKVKRAEKVQKKFLGRPIEVWKLYFNHPQDVPAIRDRIRAHPAVVDIYEYDIPFAKRYLIDKGLIPMEGDEELTMLAFAIATLYHEGEEFGTGPILMISYADGSEARVITWKKIDLPYVDVVSTEKEMIKRFLRVVREKDPDVLITYNGDNFDFAYLKKRCEELGIKFTLGRDGSEPKIQRMGDRFAVEVKGRIHFDLYPVIRRTINLPTYTLEAVYEAVFGKPKEKVYAEEIAQAWESGEGLERVARYSMEDAKVTYELGREFFPMEAQLSRLIGQSLWDVSRSSTGNLVEAFLLRKAYKRNELAPNKPDERELARRRGGYAGGYVKEPERGLWDNIVYLDFRSWYPSIIITHNVSPDTLNREGCKEYDVAPEVGHKFCKDFPGFIPSLLGDLLEEASKIERKMKATVDPLEKKLLVYRQWLIYILANSFYGYYGYAKARWYCKECAESVTAWGREYIEMVIRELEEKFGFKVLYADTDGLHATIPGADAETVKKKAKEFLKYINPKLPGLLELEYEGFYVRGFFVTKKKYAVIDEEGKITTRGLEIVRRDWSEIAKETQARVLEAILKHGDVEEAVRIVKEVTEKLSKYEVPPEKLVIHEQITRDLRDYKATGPHVAVAKRLAARGVKIRPGTVISYIVLKGSGRIGDRAIPADEFDPTKHRYDAEYYIENQVLPAVERILKAFGYRKEDLRYQKTKQVGSGAWLKVKGKKGTEAYVEQKLISEEDLNSAVDHHHHHH

SEQ ID NO: 603 - DNA, 2409 bp, Artificial Sequence
  Description of Artificial Sequence:Thermococcus species 9degreesN-7 mutant DNA polymerase, 9degreesN mutant
atgattctcgataccgactacatcaccgagaacgggaagcccgtgataagggtcttcaagaaggagaacggcgagtttaaaatcgagtacgacagaaccttcgagccctacttctacgcccttctgaaggacgattctgcgatagaggacgtcaagaaggtaaccgcaaagaggcacggaacggttgtcaaggtgaagcgcgccgagaaggtgcagaagaagttcctcggcaggccgatagaggtctggaagctctacttcaaccatcctcaggacgtcccggcgattcgagacaggatacgcgcccaccccgctgtcgttgacatctacgagtacgacatacccttcgccaagcgctacctcatcgacaagggcctgattccgatggagggcgacgaggagcttacgatgctcgccttcgcgatcgcaaccctctatcacgagggcgaggagttcggaaccgggccgattctcatgataagctacgccgacgggagcgaggcgagggtgataacctggaagaagattgaccttccgtacgttgacgtcgtctcgaccgagaaggagatgattaagcgcttcctccgcgtcgtcagggagaaggaccccgacgtgctcatcacctacaacggcgacaacttcgacttcgcctacctgaagaagcgctgtgaggaactcggaataaagttcacactcggcagggacgggagcgagccgaagatacagcgaatgggcgaccgctttgccgttgaggtgaagggcaggattcacttcgacctctaccccgtcataaggcgcacgataaacctcccgacctacacccttgaggccgtttacgaggccgtctttggaaagcccaaggagaaggtttacgcagaggagatagcgcaggcctgggagagcggggagggccttgaaagggttgcaagatactcgatggaggacgctaaggtgacctacgagctgggaagggagttcttcccgatggaggcccagctttcgaggcttataggccagagcctctgggacgtctcgcgctcgagcaccggaaatttggtggaggcattcctcctgcggaaggcctacaagaggaacgagctcgccccaaacaagcccgacgagagggagctcgcgagacggcgcgggggctacgctggcgggtacgttaaggaaccagagcggggattgtgggacaacattgtgtatttagacttccgctcgtggtatccttcaatcatcataacccacaacgtctcgccggataccctcaaccgcgagggctgtaaagagtacgacgtcgcccctgaggttggacacaagttctgcaaggacttccccggcttcataccaagcctcctgggagatttgctcgaggaggcgagcaagatagagcggaagatgaaggcaacggttgacccgctggagaagaaactcctcgtgtacaggcagtggcttataatgatcctcgccaacagcttctacggctactacggctacgccaaggcccggtggtactgcaaggagtgcgccgagagcgttacggcctggggaagggagtatatagaaatggttatccgggaactcgaagaaaaattcggttttaaagttctctatgccgatacagacggtctccatgctaccattcccggagcagacgctgaaacagtcaagaaaaaagcaaaggagttcttaaaatacattaatccaaaactgcccggcctgctcgaacttgagtacgagggcttctacgtgaggggcttcttcgtcacgaagaagaagtacgctgtgatagacgaggagggcaagataaccacgaggggtcttgagattgtgaggcgcgactggagcgagatagcgaaggagacccaggccagggtcttagaggcgatactcaagcacggtgacgtcgaggaggccgttaggatagtcaaggaagtgacggaaaagctgagcaagtatgaggtcccgcccgagaagctggtaatccacgagcagataacgcgcgatttgagggattacaaagccaccggcccgcacgttgccgttgcgaagaggctcgcggcgcgtggagtgaaaatccggcccggcacggtgataagctacatcgtcctaaagggctctggaaggataggcgacagggcgattccagctgatgagttcgacccgacgaagcaccgctacgatgcggaatactacatcgagaaccaggttctcccggcggtggagaggattctaaaagccttcggctatcggaaggaggatttgcgctaccagaagacgaagcaggtcggctcgggcgcgtggctgaaggtgaaggggaagaagggtaccgaagcttacgtagaacaaaaactcatctcagaagaggatctgaatagcgccgtcgaccatcatcatcatcatcattga

SEQ ID NO: 604 - protein, 802 aa, Artificial Sequence
  Description of Artificial Sequence:Thermococcus species 9degreesN-7 mutant DNA polymerase, 9degreesN mutant
MILDTDYITENGKPVIRVFKKENGEFKIEYDRTFEPYFYALLKDDSAIEDVKKVTAKRHGTVVKVKRAEKVQKKFLGRPIEVWKLYFNHPQDVPAIRDRIRAHPAVVDIYEYDIPFAKRYLIDKGLIPMEGDEELTMLAFAIATLYHEGEEFGTGPILMISYADGSEARVITWKKIDLPYVDVVSTEKEMIKRFLRVVREKDPDVLITYNGDNFDFAYLKKRCEELGIKFTLGRDGSEPKIQRMGDRFAVEVKGRIHFDLYPVIRRTINLPTYTLEAVYEAVFGKPKEKVYAEEIAQAWESGEGLERVARYSMEDAKVTYELGREFFPMEAQLSRLIGQSLWDVSRSSTGNLVEAFLLRKAYKRNELAPNKPDERELARRRGGYAGGYVKEPERGLWDNIVYLDFRSWYPSIIITHNVSPDTLNREGCKEYDVAPEVGHKFCKDFPGFIPSLLGDLLEEASKIERKMKATVDPLEKKLLVYRQWLIMILANSFYGYYGYAKARWYCKECAESVTAWGREYIEMVIRELEEKFGFKVLYADTDGLHATIPGADAETVKKKAKEFLKYINPKLPGLLELEYEGFYVRGFFVTKKKYAVIDEEGKITTRGLEIVRRDWSEIAKETQARVLEAILKHGDVEEAVRIVKEVTEKLSKYEVPPEKLVIHEQITRDLRDYKATGPHVAVAKRLAARGVKIRPGTVISYIVLKGSGRIGDRAIPADEFDPTKHRYDAEYYIENQVLPAVERILKAFGYRKEDLRYQKTKQVGSGAWLKVKGKKGTEAYVEQKLISEEDLNSAVDHHHHHH

SEQ ID NO: 605 - DNA, 2409 bp, Artificial Sequence
  Description of Artificial Sequence:Thermococcus species 9degreesN-7 mutant DNA polymerase, 9degreesN mutant
atgattctcgataccgactacatcaccgagaacgggaagcccgtgataagggtcttcaagaaggagaacggcgagtttaaaatcgagtacgacagaaccttcgagccctacttctacgcccttctgaaggacgattctgcgatagaggacgtcaagaaggtaaccgcaaagaggcacggaacggttgtcaaggtgaagcgcgccgagaaggtgcagaagaagttcctcggcaggccgatagaggtctggaagctctacttcaaccatcctcaggacgtcccggcgattcgagacaggatacgcgcccaccccgctgtcgttgacatctacgagtacgacatacccttcgccaagcgctacctcatcgacaagggcctgattccgatggagggcgacgaggagcttacgatgctcgccttcgcgatcgcaaccctctatcacgagggcgaggagttcggaaccgggccgattctcatgataagctacgccgacgggagcgaggcgagggtgataacctggaagaagattgaccttccgtacgttgacgtcgtctcgaccgagaaggagatgattaagcgcttcctccgcgtcgtcagggagaaggaccccgacgtgctcatcacctacaacggcgacaacttcgacttcgcctacctgaagaagcgctgtgaggaactcggaataaagttcacactcggcagggacgggagcgagccgaagatacagcgaatgggcgaccgctttgccgttgaggtgaagggcaggattcacttcgacctctaccccgtcataaggcgcacgataaacctcccgacctacacccttgaggccgtttacgaggccgtctttggaaagcccaaggagaaggtttacgcagaggagatagcgcaggcctgggagagcggggagggccttgaaagggttgcaagatactcgatggaggacgctaaggtgacctacgagctgggaagggagttcttcccgatggaggcccagctttcgaggcttataggccagagcctctgggacgtctcgcgctcgagcaccggaaatttggtggaggcattcctcctgcggaaggcctacaagaggaacgagctcgccccaaacaagcccgacgagagggagctcgcgagacggcgcgggggctacgctggcgggtacgttaaggaaccagagcggggattgtgggacaacattgtgtatttagacttccgctcgtggtatccttcaatcatcataacccacaacgtctcgccggataccctcaaccgcgagggctgtaaagagtacgacgtcgcccctgaggttggacacaagttctgcaaggacttccccggcttcataccaagcctcctgggagatttgctcgaggaggcgagcaagatagagcggaagatgaaggcaacggttgacccgctggagaagaaactcctcgtgtacaggcagtggcttataggtatcctcgccaacagcttctacggctactacggctacgccaaggcccggtggtactgcaaggagtgcgccgagagcgttacggcctggggaagggagtatatagaaatggttatccgggaactcgaagaaaaattcggttttaaagttctctatgccgatacagacggtctccatgctaccattcccggagcagacgctgaaacagtcaagaaaaaagcaaaggagttcttaaaatacattaatccaaaactgcccggcctgctcgaacttgagtacgagggcttctacgtgaggggcttcttcgtcacgaagaagaagtacgctgtgatagacgaggagggcaagataaccacgaggggtcttgagattgtgaggcgcgactggagcgagatagcgaaggagacccaggccagggtcttagaggcgatactcaagcacggtgacgtcgaggaggccgttaggatagtcaaggaagtgacggaaaagctgagcaagtatgaggtcccgcccgagaagctggtaatccacgagcagataacgcgcgatttgagggattacaaagccaccggcccgcacgttgccgttgcgaagaggctcgcggcgcgtggagtgaaaatccggcccggcacggtgataagctacatcgtcctaaagggctctggaaggataggcgacagggcgattccagctgatgagttcgacccgacgaagcaccgctacgatgcggaatactacatcgagaaccaggttctcccggcggtggagaggattctaaaagccttcggctatcggaaggaggatttgcgctaccagaagacgaagcaggtcggctcgggcgcgtggctgaaggtgaaggggaagaagggtaccgaagcttacgtagaacaaaaactcatctcagaagaggatctgaatagcgccgtcgaccatcatcatcatcatcattga

SEQ ID NO: 606 - protein, 802 aa, Artificial Sequence
  Description of Artificial Sequence:Thermococcus species 9degreesN-7 mutant DNA polymerase, 9degreesN mutant
MILDTDYITENGKPVIRVFKKENGEFKIEYDRTFEPYFYALLKDDSAIEDVKKVTAKRHGTVVKVKRAEKVQKKFLGRPIEVWKLYFNHPQDVPAIRDRIRAHPAVVDIYEYDIPFAKRYLIDKGLIPMEGDEELTMLAFAIATLYHEGEEFGTGPILMISYADGSEARVITWKKIDLPYVDVVSTEKEMIKRFLRVVREKDPDVLITYNGDNFDFAYLKKRCEELGIKFTLGRDGSEPKIQRMGDRFAVEVKGRIHFDLYPVIRRTINLPTYTLEAVYEAVFGKPKEKVYAEEIAQAWESGEGLERVARYSMEDAKVTYELGREFFPMEAQLSRLIGQSLWDVSRSSTGNLVEAFLLRKAYKRNELAPNKPDERELARRRGGYAGGYVKEPERGLWDNIVYLDFRSWYPSIIITHNVSPDTLNREGCKEYDVAPEVGHKFCKDFPGFIPSLLGDLLEEASKIERKMKATVDPLEKKLLVYRQWLIGILANSFYGYYGYAKARWYCKECAESVTAWGREYIEMVIRELEEKFGFKVLYADTDGLHATIPGADAETVKKKAKEFLKYINPKLPGLLELEYEGFYVRGFFVTKKKYAVIDEEGKITTRGLEIVRRDWSEIAKETQARVLEAILKHGDVEEAVRIVKEVTEKLSKYEVPPEKLVIHEQITRDLRDYKATGPHVAVAKRLAARGVKIRPGTVISYIVLKGSGRIGDRAIPADEFDPTKHRYDAEYYIENQVLPAVERILKAFGYRKEDLRYQKTKQVGSGAWLKVKGKKGTEAYVEQKLISEEDLNSAVDHHHHHH

SEQ ID NO: 607 - DNA, 2409 bp, Artificial Sequence
  Description of Artificial Sequence:Thermococcus species 9degreesN-7 mutant DNA polymerase, 9degreesN mutant
atgattctcgataccgactacatcaccgagaacgggaagcccgtgataagggtcttcaagaaggagaacggcgagtttaaaatcgagtacgacagaaccttcgagccctacttctacgcccttctgaaggacgattctgcgatagaggacgtcaagaaggtaaccgcaaagaggcacggaacggttgtcaaggtgaagcgcgccgagaaggtgcagaagaagttcctcggcaggccgatagaggtctggaagctctacttcaaccatcctcaggacgtcccggcgattcgagacaggatacgcgcccaccccgctgtcgttgacatctacgagtacgacatacccttcgccaagcgctacctcatcgacaagggcctgattccgatggagggcgacgaggagcttacgatgctcgccttcgcgatcgcaaccctctatcacgagggcgaggagttcggaaccgggccgattctcatgataagctacgccgacgggagcgaggcgagggtgataacctggaagaagattgaccttccgtacgttgacgtcgtctcgaccgagaaggagatgattaagcgcttcctccgcgtcgtcagggagaaggaccccgacgtgctcatcacctacaacggcgacaacttcgacttcgcctacctgaagaagcgctgtgaggaactcggaataaagttcacactcggcagggacgggagcgagccgaagatacagcgaatgggcgaccgctttgccgttgaggtgaagggcaggattcacttcgacctctaccccgtcataaggcgcacgataaacctcccgacctacacccttgaggccgtttacgaggccgtctttggaaagcccaaggagaaggtttacgcagaggagatagcgcaggcctgggagagcggggagggccttgaaagggttgcaagatactcgatggaggacgctaaggtgacctacgagctgggaagggagttcttcccgatggaggcccagctttcgaggcttataggccagagcctctgggacgtctcgcgctcgagcaccggaaatttggtggaggcattcctcctgcggaaggcctacaagaggaacgagctcgccccaaacaagcccgacgagagggagctcgcgagacggcgcgggggctacgctggcgggtacgttaaggaaccagagcggggattgtgggacaacattgtgtatttagacttccgctcgtggtatccttcaatcatcataacccacaacgtctcgccggataccctcaaccgcgagggctgtaaagagtacgacgtcgcccctgaggttggacacaagttctgcaaggacttccccggcttcataccaagcctcctgggagatttgctcgaggaggcgagcaagatagagcggaagatgaaggcaacggttgacccgctggagaagaaactcctcgtgtacaggcagtggcttataaaaatcctcgccacgagcttctacggctactacggctacgccaaggcccggtggtactgcaaggagtgcgccgagagcgttacggcctggggaagggagtatatagaaatggttatccgggaactcgaagaaaaattcggttttaaagttctctatgccgatacagacggtctccatgctaccattcccggagcagacgctgaaacagtcaagaaaaaagcaaaggagttcttaaaatacattaatccaaaactgcccggcctgctcgaacttgagtacgagggcttctacgtgaggggcttcttcgtcacgaagaagaagtacgctgtgatagacgaggagggcaagataaccacgaggggtcttgagattgtgaggcgcgactggagcgagatagcgaaggagacccaggccagggtcttagaggcgatactcaagcacggtgacgtcgaggaggccgttaggatagtcaaggaagtgacggaaaagctgagcaagtatgaggtcccgcccgagaagctggtaatccacgagcagataacgcgcgatttgagggattacaaagccaccggcccgcacgttgccgttgcgaagaggctcgcggcgcgtggagtgaaaatccggcccggcacggtgataagctacatcgtcctaaagggctctggaaggataggcgacagggcgattccagctgatgagttcgacccgacgaagcaccgctacgatgcggaatactacatcgagaaccaggttctcccggcggtggagaggattctaaaagccttcggctatcggaaggaggatttgcgctaccagaagacgaagcaggtcggctcgggcgcgtggctgaaggtgaaggggaagaagggtaccgaagcttacgtagaacaaaaactcatctcagaagaggatctgaatagcgccgtcgaccatcatcatcatcatcattga

SEQ ID NO: 608 - protein, 802 aa, Artificial Sequence
  Description of Artificial Sequence:Thermococcus species 9degreesN-7 mutant DNA polymerase, 9degreesN mutant
MILDTDYITENGKPVIRVFKKENGEFKIEYDRTFEPYFYALLKDDSAIEDVKKVTAKRHGTVVKVKRAEKVQKKFLGRPIEVWKLYFNHPQDVPAIRDRIRAHPAVVDIYEYDIPFAKRYLIDKGLIPMEGDEELTMLAFAIATLYHEGEEFGTGPILMISYADGSEARVITWKKIDLPYVDVVSTEKEMIKRFLRVVREKDPDVLITYNGDNFDFAYLKKRCEELGIKFTLGRDGSEPKIQRMGDRFAVEVKGRIHFDLYPVIRRTINLPTYTLEAVYEAVFGKPKEKVYAEEIAQAWESGEGLERVARYSMEDAKVTYELGREFFPMEAQLSRLIGQSLWDVSRSSTGNLVEAFLLRKAYKRNELAPNKPDERELARRRGGYAGGYVKEPERGLWDNIVYLDFRSWYPSIIITHNVSPDTLNREGCKEYDVAPEVGHKFCKDFPGFIPSLLGDLLEEASKIERKMKATVDPLEKKLLVYRQWLIKILATSFYGYYGYAKARWYCKECAESVTAWGREYIEMVIRELEEKFGFKVLYADTDGLHATIPGADAETVKKKAKEFLKYINPKLPGLLELEYEGFYVRGFFVTKKKYAVIDEEGKITTRGLEIVRRDWSEIAKETQARVLEAILKHGDVEEAVRIVKEVTEKLSKYEVPPEKLVIHEQITRDLRDYKATGPHVAVAKRLAARGVKIRPGTVISYIVLKGSGRIGDRAIPADEFDPTKHRYDAEYYIENQVLPAVERILKAFGYRKEDLRYQKTKQVGSGAWLKVKGKKGTEAYVEQKLISEEDLNSAVDHHHHHH

SEQ ID NO: 609 - DNA, 2409 bp, Artificial Sequence
  Description of Artificial Sequence:Thermococcus species 9degreesN-7 mutant DNA polymerase, 9degreesN mutant
atgattctcgataccgactacatcaccgagaacgggaagcccgtgataagggtcttcaagaaggagaacggcgagtttaaaatcgagtacgacagaaccttcgagccctacttctacgcccttctgaaggacgattctgcgatagaggacgtcaagaaggtaaccgcaaagaggcacggaacggttgtcaaggtgaagcgcgccgagaaggtgcagaagaagttcctcggcaggccgatagaggtctggaagctctacttcaaccatcctcaggacgtcccggcgattcgagacaggatacgcgcccaccccgctgtcgttgacatctacgagtacgacatacccttcgccaagcgctacctcatcgacaagggcctgattccgatggagggcgacgaggagcttacgatgctcgccttcgcgatcgcaaccctctatcacgagggcgaggagttcggaaccgggccgattctcatgataagctacgccgacgggagcgaggcgagggtgataacctggaagaagattgaccttccgtacgttgacgtcgtctcgaccgagaaggagatgattaagcgcttcctccgcgtcgtcagggagaaggaccccgacgtgctcatcacctacaacggcgacaacttcgacttcgcctacctgaagaagcgctgtgaggaactcggaataaagttcacactcggcagggacgggagcgagccgaagatacagcgaatgggcgaccgctttgccgttgaggtgaagggcaggattcacttcgacctctaccccgtcataaggcgcacgataaacctcccgacctacacccttgaggccgtttacgaggccgtctttggaaagcccaaggagaaggtttacgcagaggagatagcgcaggcctgggagagcggggagggccttgaaagggttgcaagatactcgatggaggacgctaaggtgacctacgagctgggaagggagttcttcccgatggaggcccagctttcgaggcttataggccagagcctctgggacgtctcgcgctcgagcaccggaaatttggtggaggcattcctcctgcggaaggcctacaagaggaacgagctcgccccaaacaagcccgacgagagggagctcgcgagacggcgcgggggctacgctggcgggtacgttaaggaaccagagcggggattgtgggacaacattgtgtatttagacttccgctcgtggtatccttcaatcatcataacccacaacgtctcgccggataccctcaaccgcgagggctgtaaagagtacgacgtcgcccctgaggttggacacaagttctgcaaggacttccccggcttcataccaagcctcctgggagatttgctcgaggaggcgagcaagatagagcggaagatgaaggcaacggttgacccgctggagaagaaactcctcgtgtacaggcagtggcttataaaaatcctcgccgatagcttctacggctactacggctacgccaaggcccggtggtactgcaaggagtgcgccgagagcgttacggcctggggaagggagtatatagaaatggttatccgggaactcgaagaaaaattcggttttaaagttctctatgccgatacagacggtctccatgctaccattcccggagcagacgctgaaacagtcaagaaaaaagcaaaggagttcttaaaatacattaatccaaaactgcccggcctgctcgaacttgagtacgagggcttctacgtgaggggcttcttcgtcacgaagaagaagtacgctgtgatagacgaggagggcaagataaccacgaggggtcttgagattgtgaggcgcgactggagcgagatagcgaaggagacccaggccagggtcttagaggcgatactcaagcacggtgacgtcgaggaggccgttaggatagtcaaggaagtgacggaaaagctgagcaagtatgaggtcccgcccgagaagctggtaatccacgagcagataacgcgcgatttgagggattacaaagccaccggcccgcacgttgccgttgcgaagaggctcgcggcgcgtggagtgaaaatccggcccggcacggtgataagctacatcgtcctaaagggctctggaaggataggcgacagggcgattccagctgatgagttcgacccgacgaagcaccgctacgatgcggaatactacatcgagaaccaggttctcccggcggtggagaggattctaaaagccttcggctatcggaaggaggatttgcgctaccagaagacgaagcaggtcggctcgggcgcgtggctgaaggtgaaggggaagaagggtaccgaagcttacgtagaacaaaaactcatctcagaagaggatctgaatagcgccgtcgaccatcatcatcatcatcattga

SEQ ID NO: 610 - protein, 802 aa, Artificial Sequence
  Description of Artificial Sequence:Thermococcus species 9degreesN-7 mutant DNA polymerase, 9degreesN mutant
MILDTDYITENGKPVIRVFKKENGEFKIEYDRTFEPYFYALLKDDSAIEDVKKVTAKRHGTVVKVKRAEKVQKKFLGRPIEVWKLYFNHPQDVPAIRDRIRAHPAVVDIYEYDIPFAKRYLIDKGLIPMEGDEELTMLAFAIATLYHEGEEFGTGPILMISYADGSEARVITWKKIDLPYVDVVSTEKEMIKRFLRVVREKDPDVLITYNGDNFDFAYLKKRCEELGIKFTLGRDGSEPKIQRMGDRFAVEVKGRIHFDLYPVIRRTINLPTYTLEAVYEAVFGKPKEKVYAEEIAQAWESGEGLERVARYSMEDAKVTYELGREFFPMEAQLSRLIGQSLWDVSRSSTGNLVEAFLLRKAYKRNELAPNKPDERELARRRGGYAGGYVKEPERGLWDNIVYLDFRSWYPSIIITHNVSPDTLNREGCKEYDVAPEVGHKFCKDFPGFIPSLLGDLLEEASKIERKMKATVDPLEKKLLVYRQWLIKILADSFYGYYGYAKARWYCKECAESVTAWGREYIEMVIRELEEKFGFKVLYADTDGLHATIPGADAETVKKKAKEFLKYINPKLPGLLELEYEGFYVRGFFVTKKKYAVIDEEGKITTRGLEIVRRDWSEIAKETQARVLEAILKHGDVEEAVRIVKEVTEKLSKYEVPPEKLVIHEQITRDLRDYKATGPHVAVAKRLAARGVKIRPGTVISYIVLKGSGRIGDRAIPADEFDPTKHRYDAEYYIENQVLPAVERILKAFGYRKEDLRYQKTKQVGSGAWLKVKGKKGTEAYVEQKLISEEDLNSAVDHHHHHH

SEQ ID NO: 611 - DNA, 2409 bp, Artificial Sequence
  Description of Artificial Sequence:Thermococcus species 9degreesN-7 mutant DNA polymerase, 9degreesN mutant
atgattctcgataccgactacatcaccgagaacgggaagcccgtgataagggtcttcaagaaggagaacggcgagtttaaaatcgagtacgacagaaccttcgagccctacttctacgcccttctgaaggacgattctgcgatagaggacgtcaagaaggtaaccgcaaagaggcacggaacggttgtcaaggtgaagcgcgccgagaaggtgcagaagaagttcctcggcaggccgatagaggtctggaagctctacttcaaccatcctcaggacgtcccggcgattcgagacaggatacgcgcccaccccgctgtcgttgacatctacgagtacgacatacccttcgccaagcgctacctcatcgacaagggcctgattccgatggagggcgacgaggagcttacgatgctcgccttcgcgatcgcaaccctctatcacgagggcgaggagttcggaaccgggccgattctcatgataagctacgccgacgggagcgaggcgagggtgataacctggaagaagattgaccttccgtacgttgacgtcgtctcgaccgagaaggagatgattaagcgcttcctccgcgtcgtcagggagaaggaccccgacgtgctcatcacctacaacggcgacaacttcgacttcgcctacctgaagaagcgctgtgaggaactcggaataaagttcacactcggcagggacgggagcgagccgaagatacagcgaatgggcgaccgctttgccgttgaggtgaagggcaggattcacttcgacctctaccccgtcataaggcgcacgataaacctcccgacctacacccttgaggccgtttacgaggccgtctttggaaagcccaaggagaaggtttacgcagaggagatagcgcaggcctgggagagcggggagggccttgaaagggttgcaagatactcgatggaggacgctaaggtgacctacgagctgggaagggagttcttcccgatggaggcccagctttcgaggcttataggccagagcctctgggacgtctcgcgctcgagcaccggaaatttggtggaggcattcctcctgcggaaggcctacaagaggaacgagctcgccccaaacaagcccgacgagagggagctcgcgagacggcgcgggggctacgctggcgggtacgttaaggaaccagagcggggattgtgggacaacattgtgtatttagacttccgctcgtggtatccttcaatcatcataacccacaacgtctcgccggataccctcaaccgcgagggctgtaaagagtacgacgtcgcccctgaggttggacacaagttctgcaaggacttccccggcttcataccaagcctcctgggagatttgctcgaggaggcgagcaagatagagcggaagatgaaggcaacggttgacccgctggagaagaaactcctcgtgtacaggcagtggcttataaaaatcctcgcctttagcttctacggctactacggctacgccaaggcccggtggtactgcaaggagtgcgccgagagcgttacggcctggggaagggagtatatagaaatggttatccgggaactcgaagaaaaattcggttttaaagttctctatgccgatacagacggtctccatgctaccattcccggagcagacgctgaaacagtcaagaaaaaagcaaaggagttcttaaaatacattaatccaaaactgcccggcctgctcgaacttgagtacgagggcttctacgtgaggggcttcttcgtcacgaagaagaagtacgctgtgatagacgaggagggcaagataaccacgaggggtcttgagattgtgaggcgcgactggagcgagatagcgaaggagacccaggccagggtcttagaggcgatactcaagcacggtgacgtcgaggaggccgttaggatagtcaaggaagtgacggaaaagctgagcaagtatgaggtcccgcccgagaagctggtaatccacgagcagataacgcgcgatttgagggattacaaagccaccggcccgcacgttgccgttgcgaagaggctcgcggcgcgtggagtgaaaatccggcccggcacggtgataagctacatcgtcctaaagggctctggaaggataggcgacagggcgattccagctgatgagttcgacccgacgaagcaccgctacgatgcggaatactacatcgagaaccaggttctcccggcggtggagaggattctaaaagccttcggctatcggaaggaggatttgcgctaccagaagacgaagcaggtcggctcgggcgcgtggctgaaggtgaaggggaagaagggtaccgaagcttacgtagaacaaaaactcatctcagaagaggatctgaatagcgccgtcgaccatcatcatcatcatcattga

SEQ ID NO: 612 - protein, 802 aa, Artificial Sequence
  Description of Artificial Sequence:Thermococcus species 9degreesN-7 mutant DNA polymerase, 9degreesN mutant
MILDTDYITENGKPVIRVFKKENGEFKIEYDRTFEPYFYALLKDDSAIEDVKKVTAKRHGTVVKVKRAEKVQKKFLGRPIEVWKLYFNHPQDVPAIRDRIRAHPAVVDIYEYDIPFAKRYLIDKGLIPMEGDEELTMLAFAIATLYHEGEEFGTGPILMISYADGSEARVITWKKIDLPYVDVVSTEKEMIKRFLRVVREKDPDVLITYNGDNFDFAYLKKRCEELGIKFTLGRDGSEPKIQRMGDRFAVEVKGRIHFDLYPVIRRTINLPTYTLEAVYEAVFGKPKEKVYAEEIAQAWESGEGLERVARYSMEDAKVTYELGREFFPMEAQLSRLIGQSLWDVSRSSTGNLVEAFLLRKAYKRNELAPNKPDERELARRRGGYAGGYVKEPERGLWDNIVYLDFRSWYPSIIITHNVSPDTLNREGCKEYDVAPEVGHKFCKDFPGFIPSLLGDLLEEASKIERKMKATVDPLEKKLLVYRQWLIKILAFSFYGYYGYAKARWYCKECAESVTAWGREYIEMVIRELEEKFGFKVLYADTDGLHATIPGADAETVKKKAKEFLKYINPKLPGLLELEYEGFYVRGFFVTKKKYAVIDEEGKITTRGLEIVRRDWSEIAKETQARVLEAILKHGDVEEAVRIVKEVTEKLSKYEVPPEKLVIHEQITRDLRDYKATGPHVAVAKRLAARGVKIRPGTVISYIVLKGSGRIGDRAIPADEFDPTKHRYDAEYYIENQVLPAVERILKAFGYRKEDLRYQKTKQVGSGAWLKVKGKKGTEAYVEQKLISEEDLNSAVDHHHHHH

SEQ ID NO: 613 - DNA, 2409 bp, Artificial Sequence
  Description of Artificial Sequence:Thermococcus species 9degreesN-7 mutant DNA polymerase, 9degreesN mutant
atgattctcgataccgactacatcaccgagaacgggaagcccgtgataagggtcttcaagaaggagaacggcgagtttaaaatcgagtacgacagaaccttcgagccctacttctacgcccttctgaaggacgattctgcgatagaggacgtcaagaaggtaaccgcaaagaggcacggaacggttgtcaaggtgaagcgcgccgagaaggtgcagaagaagttcctcggcaggccgatagaggtctggaagctctacttcaaccatcctcaggacgtcccggcgattcgagacaggatacgcgcccaccccgctgtcgttgacatctacgagtacgacatacccttcgccaagcgctacctcatcgacaagggcctgattccgatggagggcgacgaggagcttacgatgctcgccttcgcgatcgcaaccctctatcacgagggcgaggagttcggaaccgggccgattctcatgataagctacgccgacgggagcgaggcgagggtgataacctggaagaagattgaccttccgtacgttgacgtcgtctcgaccgagaaggagatgattaagcgcttcctccgcgtcgtcagggagaaggaccccgacgtgctcatcacctacaacggcgacaacttcgacttcgcctacctgaagaagcgctgtgaggaactcggaataaagttcacactcggcagggacgggagcgagccgaagatacagcgaatgggcgaccgctttgccgttgaggtgaagggcaggattcacttcgacctctaccccgtcataaggcgcacgataaacctcccgacctacacccttgaggccgtttacgaggccgtctttggaaagcccaaggagaaggtttacgcagaggagatagcgcaggcctgggagagcggggagggccttgaaagggttgcaagatactcgatggaggacgctaaggtgacctacgagctgggaagggagttcttcccgatggaggcccagctttcgaggcttataggccagagcctctgggacgtctcgcgctcgagcaccggaaatttggtggaggcattcctcctgcggaaggcctacaagaggaacgagctcgccccaaacaagcccgacgagagggagctcgcgagacggcgcgggggctacgctggcgggtacgttaaggaaccagagcggggattgtgggacaacattgtgtatttagacttccgctcgtggtatccttcaatcatcataacccacaacgtctcgccggataccctcaaccgcgagggctgtaaagagtacgacgtcgcccctgaggttggacacaagttctgcaaggacttccccggcttcataccaagcctcctgggagatttgctcgaggaggcgagcaagatagagcggaagatgaaggcaacggttgacccgctggagaagaaactcctcgtgtacaggcagtggcttataaaaatcctcgccagaagcttctacggctactacggctacgccaaggcccggtggtactgcaaggagtgcgccgagagcgttacggcctggggaagggagtatatagaaatggttatccgggaactcgaagaaaaattcggttttaaagttctctatgccgatacagacggtctccatgctaccattcccggagcagacgctgaaacagtcaagaaaaaagcaaaggagttcttaaaatacattaatccaaaactgcccggcctgctcgaacttgagtacgagggcttctacgtgaggggcttcttcgtcacgaagaagaagtacgctgtgatagacgaggagggcaagataaccacgaggggtcttgagattgtgaggcgcgactggagcgagatagcgaaggagacccaggccagggtcttagaggcgatactcaagcacggtgacgtcgaggaggccgttaggatagtcaaggaagtgacggaaaagctgagcaagtatgaggtcccgcccgagaagctggtaatccacgagcagataacgcgcgatttgagggattacaaagccaccggcccgcacgttgccgttgcgaagaggctcgcggcgcgtggagtgaaaatccggcccggcacggtgataagctacatcgtcctaaagggctctggaaggataggcgacagggcgattccagctgatgagttcgacccgacgaagcaccgctacgatgcggaatactacatcgagaaccaggttctcccggcggtggagaggattctaaaagccttcggctatcggaaggaggatttgcgctaccagaagacgaagcaggtcggctcgggcgcgtggctgaaggtgaaggggaagaagggtaccgaagcttacgtagaacaaaaactcatctcagaagaggatctgaatagcgccgtcgaccatcatcatcatcatcattga

SEQ ID NO: 614 - protein, 802 aa, Artificial Sequence
  Description of Artificial Sequence:Thermococcus species 9degreesN-7 mutant DNA polymerase, 9degreesN mutant
MILDTDYITENGKPVIRVFKKENGEFKIEYDRTFEPYFYALLKDDSAIEDVKKVTAKRHGTVVKVKRAEKVQKKFLGRPIEVWKLYFNHPQDVPAIRDRIRAHPAVVDIYEYDIPFAKRYLIDKGLIPMEGDEELTMLAFAIATLYHEGEEFGTGPILMISYADGSEARVITWKKIDLPYVDVVSTEKEMIKRFLRVVREKDPDVLITYNGDNFDFAYLKKRCEELGIKFTLGRDGSEPKIQRMGDRFAVEVKGRIHFDLYPVIRRTINLPTYTLEAVYEAVFGKPKEKVYAEEIAQAWESGEGLERVARYSMEDAKVTYELGREFFPMEAQLSRLIGQSLWDVSRSSTGNLVEAFLLRKAYKRNELAPNKPDERELARRRGGYAGGYVKEPERGLWDNIVYLDFRSWYPSIIITHNVSPDTLNREGCKEYDVAPEVGHKFCKDFPGFIPSLLGDLLEEASKIERKMKATVDPLEKKLLVYRQWLIKILARSFYGYYGYAKARWYCKECAESVTAWGREYIEMVIRELEEKFGFKVLYADTDGLHATIPGADAETVKKKAKEFLKYINPKLPGLLELEYEGFYVRGFFVTKKKYAVIDEEGKITTRGLEIVRRDWSEIAKETQARVLEAILKHGDVEEAVRIVKEVTEKLSKYEVPPEKLVIHEQITRDLRDYKATGPHVAVAKRLAARGVKIRPGTVISYIVLKGSGRIGDRAIPADEFDPTKHRYDAEYYIENQVLPAVERILKAFGYRKEDLRYQKTKQVGSGAWLKVKGKKGTEAYVEQKLISEEDLNSAVDHHHHHH

SEQ ID NO: 615 - DNA, 2409 bp, Artificial Sequence
  Description of Artificial Sequence:Thermococcus species 9degreesN-7 mutant DNA polymerase, 9degreesN mutant
atgattctcgataccgactacatcaccgagaacgggaagcccgtgataagggtcttcaagaaggagaacggcgagtttaaaatcgagtacgacagaaccttcgagccctacttctacgcccttctgaaggacgattctgcgatagaggacgtcaagaaggtaaccgcaaagaggcacggaacggttgtcaaggtgaagcgcgccgagaaggtgcagaagaagttcctcggcaggccgatagaggtctggaagctctacttcaaccatcctcaggacgtcccggcgattcgagacaggatacgcgcccaccccgctgtcgttgacatctacgagtacgacatacccttcgccaagcgctacctcatcgacaagggcctgattccgatggagggcgacgaggagcttacgatgctcgccttcgcgatcgcaaccctctatcacgagggcgaggagttcggaaccgggccgattctcatgataagctacgccgacgggagcgaggcgagggtgataacctggaagaagattgaccttccgtacgttgacgtcgtctcgaccgagaaggagatgattaagcgcttcctccgcgtcgtcagggagaaggaccccgacgtgctcatcacctacaacggcgacaacttcgacttcgcctacctgaagaagcgctgtgaggaactcggaataaagttcacactcggcagggacgggagcgagccgaagatacagcgaatgggcgaccgctttgccgttgaggtgaagggcaggattcacttcgacctctaccccgtcataaggcgcacgataaacctcccgacctacacccttgaggccgtttacgaggccgtctttggaaagcccaaggagaaggtttacgcagaggagatagcgcaggcctgggagagcggggagggccttgaaagggttgcaagatactcgatggaggacgctaaggtgacctacgagctgggaagggagttcttcccgatggaggcccagctttcgaggcttataggccagagcctctgggacgtctcgcgctcgagcaccggaaatttggtggaggcattcctcctgcggaaggcctacaagaggaacgagctcgccccaaacaagcccgacgagagggagctcgcgagacggcgcgggggctacgctggcgggtacgttaaggaaccagagcggggattgtgggacaacattgtgtatttagacttccgctcgtggtatccttcaatcatcataacccacaacgtctcgccggataccctcaaccgcgagggctgtaaagagtacgacgtcgcccctgaggttggacacaagttctgcaaggacttccccggcttcataccaagcctcctgggagatttgctcgaggaggcgagcaagatagagcggaagatgaaggcaacggttgacccgctggagaagaaactcctcgtgtacaggcagtggcttataaaaatcctcgccggcagcttctacggctactacggctacgccaaggcccggtggtactgcaaggagtgcgccgagagcgttacggcctggggaagggagtatatagaaatggttatccgggaactcgaagaaaaattcggttttaaagttctctatgccgatacagacggtctccatgctaccattcccggagcagacgctgaaacagtcaagaaaaaagcaaaggagttcttaaaatacattaatccaaaactgcccggcctgctcgaacttgagtacgagggcttctacgtgaggggcttcttcgtcacgaagaagaagtacgctgtgatagacgaggagggcaagataaccacgaggggtcttgagattgtgaggcgcgactggagcgagatagcgaaggagacccaggccagggtcttagaggcgatactcaagcacggtgacgtcgaggaggccgttaggatagtcaaggaagtgacggaaaagctgagcaagtatgaggtcccgcccgagaagctggtaatccacgagcagataacgcgcgatttgagggattacaaagccaccggcccgcacgttgccgttgcgaagaggctcgcggcgcgtggagtgaaaatccggcccggcacggtgataagctacatcgtcctaaagggctctggaaggataggcgacagggcgattccagctgatgagttcgacccgacgaagcaccgctacgatgcggaatactacatcgagaaccaggttctcccggcggtggagaggattctaaaagccttcggctatcggaaggaggatttgcgctaccagaagacgaagcaggtcggctcgggcgcgtggctgaaggtgaaggggaagaagggtaccgaagcttacgtagaacaaaaactcatctcagaagaggatctgaatagcgccgtcgaccatcatcatcatcatcattga

SEQ ID NO: 616 - protein, 802 aa, Artificial Sequence
  Description of Artificial Sequence:Thermococcus species 9degreesN-7 mutant DNA polymerase, 9degreesN mutant
MILDTDYITENGKPVIRVFKKENGEFKIEYDRTFEPYFYALLKDDSAIEDVKKVTAKRHGTVVKVKRAEKVQKKFLGRPIEVWKLYFNHPQDVPAIRDRIRAHPAVVDIYEYDIPFAKRYLIDKGLIPMEGDEELTMLAFAIATLYHEGEEFGTGPILMISYADGSEARVITWKKIDLPYVDVVSTEKEMIKRFLRVVREKDPDVLITYNGDNFDFAYLKKRCEELGIKFTLGRDGSEPKIQRMGDRFAVEVKGRIHFDLYPVIRRTINLPTYTLEAVYEAVFGKPKEKVYAEEIAQAWESGEGLERVARYSMEDAKVTYELGREFFPMEAQLSRLIGQSLWDVSRSSTGNLVEAFLLRKAYKRNELAPNKPDERELARRRGGYAGGYVKEPERGLWDNIVYLDFRSWYPSIIITHNVSPDTLNREGCKEYDVAPEVGHKFCKDFPGFIPSLLGDLLEEASKIERKMKATVDPLEKKLLVYRQWLIKILAGSFYGYYGYAKARWYCKECAESVTAWGREYIEMVIRELEEKFGFKVLYADTDGLHATIPGADAETVKKKAKEFLKYINPKLPGLLELEYEGFYVRGFFVTKKKYAVIDEEGKITTRGLEIVRRDWSEIAKETQARVLEAILKHGDVEEAVRIVKEVTEKLSKYEVPPEKLVIHEQITRDLRDYKATGPHVAVAKRLAARGVKIRPGTVISYIVLKGSGRIGDRAIPADEFDPTKHRYDAEYYIENQVLPAVERILKAFGYRKEDLRYQKTKQVGSGAWLKVKGKKGTEAYVEQKLISEEDLNSAVDHHHHHH

SEQ ID NO: 617 - DNA, 2409 bp, Artificial Sequence
  Description of Artificial Sequence:Thermococcus species 9degreesN-7 mutant DNA polymerase, 9degreesN mutant
atgattctcgataccgactacatcaccgagaacgggaagcccgtgataagggtcttcaagaaggagaacggcgagtttaaaatcgagtacgacagaaccttcgagccctacttctacgcccttctgaaggacgattctgcgatagaggacgtcaagaaggtaaccgcaaagaggcacggaacggttgtcaaggtgaagcgcgccgagaaggtgcagaagaagttcctcggcaggccgatagaggtctggaagctctacttcaaccatcctcaggacgtcccggcgattcgagacaggatacgcgcccaccccgctgtcgttgacatctacgagtacgacatacccttcgccaagcgctacctcatcgacaagggcctgattccgatggagggcgacgaggagcttacgatgctcgccttcgcgatcgcaaccctctatcacgagggcgaggagttcggaaccgggccgattctcatgataagctacgccgacgggagcgaggcgagggtgataacctggaagaagattgaccttccgtacgttgacgtcgtctcgaccgagaaggagatgattaagcgcttcctccgcgtcgtcagggagaaggaccccgacgtgctcatcacctacaacggcgacaacttcgacttcgcctacctgaagaagcgctgtgaggaactcggaataaagttcacactcggcagggacgggagcgagccgaagatacagcgaatgggcgaccgctttgccgttgaggtgaagggcaggattcacttcgacctctaccccgtcataaggcgcacgataaacctcccgacctacacccttgaggccgtttacgaggccgtctttggaaagcccaaggagaaggtttacgcagaggagatagcgcaggcctgggagagcggggagggccttgaaagggttgcaagatactcgatggaggacgctaaggtgacctacgagctgggaagggagttcttcccgatggaggcccagctttcgaggcttataggccagagcctctgggacgtctcgcgctcgagcaccggaaatttggtggaggcattcctcctgcggaaggcctacaagaggaacgagctcgccccaaacaagcccgacgagagggagctcgcgagacggcgcgggggctacgctggcgggtacgttaaggaaccagagcggggattgtgggacaacattgtgtatttagacttccgctcgtggtatccttcaatcatcataacccacaacgtctcgccggataccctcaaccgcgagggctgtaaagagtacgacgtcgcccctgaggttggacacaagttctgcaaggacttccccggcttcataccaagcctcctgggagatttgctcgaggaggcgagcaagatagagcggaagatgaaggcaacggttgacccgctggagaagaaactcctcgtgtacaggcagtggcttataaaaatcctcgccttgagcttctacggctactacggctacgccaaggcccggtggtactgcaaggagtgcgccgagagcgttacggcctggggaagggagtatatagaaatggttatccgggaactcgaagaaaaattcggttttaaagttctctatgccgatacagacggtctccatgctaccattcccggagcagacgctgaaacagtcaagaaaaaagcaaaggagttcttaaaatacattaatccaaaactgcccggcctgctcgaacttgagtacgagggcttctacgtgaggggcttcttcgtcacgaagaagaagtacgctgtgatagacgaggagggcaagataaccacgaggggtcttgagattgtgaggcgcgactggagcgagatagcgaaggagacccaggccagggtcttagaggcgatactcaagcacggtgacgtcgaggaggccgttaggatagtcaaggaagtgacggaaaagctgagcaagtatgaggtcccgcccgagaagctggtaatccacgagcagataacgcgcgatttgagggattacaaagccaccggcccgcacgttgccgttgcgaagaggctcgcggcgcgtggagtgaaaatccggcccggcacggtgataagctacatcgtcctaaagggctctggaaggataggcgacagggcgattccagctgatgagttcgacccgacgaagcaccgctacgatgcggaatactacatcgagaaccaggttctcccggcggtggagaggattctaaaagccttcggctatcggaaggaggatttgcgctaccagaagacgaagcaggtcggctcgggcgcgtggctgaaggtgaaggggaagaagggtaccgaagcttacgtagaacaaaaactcatctcagaagaggatctgaatagcgccgtcgaccatcatcatcatcatcattga

SEQ ID NO: 618 - protein, 802 aa, Artificial Sequence
  Description of Artificial Sequence:Thermococcus species 9degreesN-7 mutant DNA polymerase, 9degreesN mutant
MILDTDYITENGKPVIRVFKKENGEFKIEYDRTFEPYFYALLKDDSAIEDVKKVTAKRHGTVVKVKRAEKVQKKFLGRPIEVWKLYFNHPQDVPAIRDRIRAHPAVVDIYEYDIPFAKRYLIDKGLIPMEGDEELTMLAFAIATLYHEGEEFGTGPILMISYADGSEARVITWKKIDLPYVDVVSTEKEMIKRFLRVVREKDPDVLITYNGDNFDFAYLKKRCEELGIKFTLGRDGSEPKIQRMGDRFAVEVKGRIHFDLYPVIRRTINLPTYTLEAVYEAVFGKPKEKVYAEEIAQAWESGEGLERVARYSMEDAKVTYELGREFFPMEAQLSRLIGQSLWDVSRSSTGNLVEAFLLRKAYKRNELAPNKPDERELARRRGGYAGGYVKEPERGLWDNIVYLDFRSWYPSIIITHNVSPDTLNREGCKEYDVAPEVGHKFCKDFPGFIPSLLGDLLEEASKIERKMKATVDPLEKKLLVYRQWLIKILALSFYGYYGYAKARWYCKECAESVTAWGREYIEMVIRELEEKFGFKVLYADTDGLHATIPGADAETVKKKAKEFLKYINPKLPGLLELEYEGFYVRGFFVTKKKYAVIDEEGKITTRGLEIVRRDWSEIAKETQARVLEAILKHGDVEEAVRIVKEVTEKLSKYEVPPEKLVIHEQITRDLRDYKATGPHVAVAKRLAARGVKIRPGTVISYIVLKGSGRIGDRAIPADEFDPTKHRYDAEYYIENQVLPAVERILKAFGYRKEDLRYQKTKQVGSGAWLKVKGKKGTEAYVEQKLISEEDLNSAVDHHHHHH

SEQ ID NO: 619 - DNA, 2409 bp, Artificial Sequence
  Description of Artificial Sequence:Thermococcus species 9degreesN-7 mutant DNA polymerase, 9degreesN mutant
atgattctcgataccgactacatcaccgagaacgggaagcccgtgataagggtcttcaagaaggagaacggcgagtttaaaatcgagtacgacagaaccttcgagccctacttctacgcccttctgaaggacgattctgcgatagaggacgtcaagaaggtaaccgcaaagaggcacggaacggttgtcaaggtgaagcgcgccgagaaggtgcagaagaagttcctcggcaggccgatagaggtctggaagctctacttcaaccatcctcaggacgtcccggcgattcgagacaggatacgcgcccaccccgctgtcgttgacatctacgagtacgacatacccttcgccaagcgctacctcatcgacaagggcctgattccgatggagggcgacgaggagcttacgatgctcgccttcgcgatcgcaaccctctatcacgagggcgaggagttcggaaccgggccgattctcatgataagctacgccgacgggagcgaggcgagggtgataacctggaagaagattgaccttccgtacgttgacgtcgtctcgaccgagaaggagatgattaagcgcttcctccgcgtcgtcagggagaaggaccccgacgtgctcatcacctacaacggcgacaacttcgacttcgcctacctgaagaagcgctgtgaggaactcggaataaagttcacactcggcagggacgggagcgagccgaagatacagcgaatgggcgaccgctttgccgttgaggtgaagggcaggattcacttcgacctctaccccgtcataaggcgcacgataaacctcccgacctacacccttgaggccgtttacgaggccgtctttggaaagcccaaggagaaggtttacgcagaggagatagcgcaggcctgggagagcggggagggccttgaaagggttgcaagatactcgatggaggacgctaaggtgacctacgagctgggaagggagttcttcccgatggaggcccagctttcgaggcttataggccagagcctctgggacgtctcgcgctcgagcaccggaaatttggtggaggcattcctcctgcggaaggcctacaagaggaacgagctcgccccaaacaagcccgacgagagggagctcgcgagacggcgcgggggctacgctggcgggtacgttaaggaaccagagcggggattgtgggacaacattgtgtatttagacttccgctcgtggtatccttcaatcatcataacccacaacgtctcgccggataccctcaaccgcgagggctgtaaagagtacgacgtcgcccctgaggttggacacaagttctgcaaggacttccccggcttcataccaagcctcctgggagatttgctcgaggaggcgagcaagatagagcggaagatgaaggcaacggttgacccgctggagaagaaactcctcgtgtacaggcagtggcttataaaaatcctcgccatcagcttctacggctactacggctacgccaaggcccggtggtactgcaaggagtgcgccgagagcgttacggcctggggaagggagtatatagaaatggttatccgggaactcgaagaaaaattcggttttaaagttctctatgccgatacagacggtctccatgctaccattcccggagcagacgctgaaacagtcaagaaaaaagcaaaggagttcttaaaatacattaatccaaaactgcccggcctgctcgaacttgagtacgagggcttctacgtgaggggcttcttcgtcacgaagaagaagtacgctgtgatagacgaggagggcaagataaccacgaggggtcttgagattgtgaggcgcgactggagcgagatagcgaaggagacccaggccagggtcttagaggcgatactcaagcacggtgacgtcgaggaggccgttaggatagtcaaggaagtgacggaaaagctgagcaagtatgaggtcccgcccgagaagctggtaatccacgagcagataacgcgcgatttgagggattacaaagccaccggcccgcacgttgccgttgcgaagaggctcgcggcgcgtggagtgaaaatccggcccggcacggtgataagctacatcgtcctaaagggctctggaaggataggcgacagggcgattccagctgatgagttcgacccgacgaagcaccgctacgatgcggaatactacatcgagaaccaggttctcccggcggtggagaggattctaaaagccttcggctatcggaaggaggatttgcgctaccagaagacgaagcaggtcggctcgggcgcgtggctgaaggtgaaggggaagaagggtaccgaagcttacgtagaacaaaaactcatctcagaagaggatctgaatagcgccgtcgaccatcatcatcatcatcattga

SEQ ID NO: 620 - protein, 802 aa, Artificial Sequence
  Description of Artificial Sequence:Thermococcus species 9degreesN-7 mutant DNA polymerase, 9degreesN mutant
MILDTDYITENGKPVIRVFKKENGEFKIEYDRTFEPYFYALLKDDSAIEDVKKVTAKRHGTVVKVKRAEKVQKKFLGRPIEVWKLYFNHPQDVPAIRDRIRAHPAVVDIYEYDIPFAKRYLIDKGLIPMEGDEELTMLAFAIATLYHEGEEFGTGPILMISYADGSEARVITWKKIDLPYVDVVSTEKEMIKRFLRVVREKDPDVLITYNGDNFDFAYLKKRCEELGIKFTLGRDGSEPKIQRMGDRFAVEVKGRIHFDLYPVIRRTINLPTYTLEAVYEAVFGKPKEKVYAEEIAQAWESGEGLERVARYSMEDAKVTYELGREFFPMEAQLSRLIGQSLWDVSRSSTGNLVEAFLLRKAYKRNELAPNKPDERELARRRGGYAGGYVKEPERGLWDNIVYLDFRSWYPSIIITHNVSPDTLNREGCKEYDVAPEVGHKFCKDFPGFIPSLLGDLLEEASKIERKMKATVDPLEKKLLVYRQWLIKILAISFYGYYGYAKARWYCKECAESVTAWGREYIEMVIRELEEKFGFKVLYADTDGLHATIPGADAETVKKKAKEFLKYINPKLPGLLELEYEGFYVRGFFVTKKKYAVIDEEGKITTRGLEIVRRDWSEIAKETQARVLEAILKHGDVEEAVRIVKEVTEKLSKYEVPPEKLVIHEQITRDLRDYKATGPHVAVAKRLAARGVKIRPGTVISYIVLKGSGRIGDRAIPADEFDPTKHRYDAEYYIENQVLPAVERILKAFGYRKEDLRYQKTKQVGSGAWLKVKGKKGTEAYVEQKLISEEDLNSAVDHHHHHH

SEQ ID NO: 621 - DNA, 2409 bp, Artificial Sequence
  Description of Artificial Sequence:Thermococcus species 9degreesN-7 mutant DNA polymerase, 9degreesN mutant
atgattctcgataccgactacatcaccgagaacgggaagcccgtgataagggtcttcaagaaggagaacggcgagtttaaaatcgagtacgacagaaccttcgagccctacttctacgcccttctgaaggacgattctgcgatagaggacgtcaagaaggtaaccgcaaagaggcacggaacggttgtcaaggtgaagcgcgccgagaaggtgcagaagaagttcctcggcaggccgatagaggtctggaagctctacttcaaccatcctcaggacgtcccggcgattcgagacaggatacgcgcccaccccgctgtcgttgacatctacgagtacgacatacccttcgccaagcgctacctcatcgacaagggcctgattccgatggagggcgacgaggagcttacgatgctcgccttcgcgatcgcaaccctctatcacgagggcgaggagttcggaaccgggccgattctcatgataagctacgccgacgggagcgaggcgagggtgataacctggaagaagattgaccttccgtacgttgacgtcgtctcgaccgagaaggagatgattaagcgcttcctccgcgtcgtcagggagaaggaccccgacgtgctcatcacctacaacggcgacaacttcgacttcgcctacctgaagaagcgctgtgaggaactcggaataaagttcacactcggcagggacgggagcgagccgaagatacagcgaatgggcgaccgctttgccgttgaggtgaagggcaggattcacttcgacctctaccccgtcataaggcgcacgataaacctcccgacctacacccttgaggccgtttacgaggccgtctttggaaagcccaaggagaaggtttacgcagaggagatagcgcaggcctgggagagcggggagggccttgaaagggttgcaagatactcgatggaggacgctaaggtgacctacgagctgggaagggagttcttcccgatggaggcccagctttcgaggcttataggccagagcctctgggacgtctcgcgctcgagcaccggaaatttggtggaggcattcctcctgcggaaggcctacaagaggaacgagctcgccccaaacaagcccgacgagagggagctcgcgagacggcgcgggggctacgctggcgggtacgttaaggaaccagagcggggattgtgggacaacattgtgtatttagacttccgctcgtggtatccttcaatcatcataacccacaacgtctcgccggataccctcaaccgcgagggctgtaaagagtacgacgtcgcccctgaggttggacacaagttctgcaaggacttccccggcttcataccaagcctcctgggagatttgctcgaggaggcgagcaagatagagcggaagatgaaggcaacggttgacccgctggagaagaaactcctcgtgtacaggcagtggcttataaaaatcctcgccgcgagcttctacggctactacggctacgccaaggcccggtggtactgcaaggagtgcgccgagagcgttacggcctggggaagggagtatatagaaatggttatccgggaactcgaagaaaaattcggttttaaagttctctatgccgatacagacggtctccatgctaccattcccggagcagacgctgaaacagtcaagaaaaaagcaaaggagttcttaaaatacattaatccaaaactgcccggcctgctcgaacttgagtacgagggcttctacgtgaggggcttcttcgtcacgaagaagaagtacgctgtgatagacgaggagggcaagataaccacgaggggtcttgagattgtgaggcgcgactggagcgagatagcgaaggagacccaggccagggtcttagaggcgatactcaagcacggtgacgtcgaggaggccgttaggatagtcaaggaagtgacggaaaagctgagcaagtatgaggtcccgcccgagaagctggtaatccacgagcagataacgcgcgatttgagggattacaaagccaccggcccgcacgttgccgttgcgaagaggctcgcggcgcgtggagtgaaaatccggcccggcacggtgataagctacatcgtcctaaagggctctggaaggataggcgacagggcgattccagctgatgagttcgacccgacgaagcaccgctacgatgcggaatactacatcgagaaccaggttctcccggcggtggagaggattctaaaagccttcggctatcggaaggaggatttgcgctaccagaagacgaagcaggtcggctcgggcgcgtggctgaaggtgaaggggaagaagggtaccgaagcttacgtagaacaaaaactcatctcagaagaggatctgaatagcgccgtcgaccatcatcatcatcatcattga

SEQ ID NO: 622 - protein, 802 aa, Artificial Sequence
  Description of Artificial Sequence:Thermococcus species 9degreesN-7 mutant DNA polymerase, 9degreesN mutant
MILDTDYITENGKPVIRVFKKENGEFKIEYDRTFEPYFYALLKDDSAIEDVKKVTAKRHGTVVKVKRAEKVQKKFLGRPIEVWKLYFNHPQDVPAIRDRIRAHPAVVDIYEYDIPFAKRYLIDKGLIPMEGDEELTMLAFAIATLYHEGEEFGTGPILMISYADGSEARVITWKKIDLPYVDVVSTEKEMIKRFLRVVREKDPDVLITYNGDNFDFAYLKKRCEELGIKFTLGRDGSEPKIQRMGDRFAVEVKGRIHFDLYPVIRRTINLPTYTLEAVYEAVFGKPKEKVYAEEIAQAWESGEGLERVARYSMEDAKVTYELGREFFPMEAQLSRLIGQSLWDVSRSSTGNLVEAFLLRKAYKRNELAPNKPDERELARRRGGYAGGYVKEPERGLWDNIVYLDFRSWYPSIIITHNVSPDTLNREGCKEYDVAPEVGHKFCKDFPGFIPSLLGDLLEEASKIERKMKATVDPLEKKLLVYRQWLIKILAASFYGYYGYAKARWYCKECAESVTAWGREYIEMVIRELEEKFGFKVLYADTDGLHATIPGADAETVKKKAKEFLKYINPKLPGLLELEYEGFYVRGFFVTKKKYAVIDEEGKITTRGLEIVRRDWSEIAKETQARVLEAILKHGDVEEAVRIVKEVTEKLSKYEVPPEKLVIHEQITRDLRDYKATGPHVAVAKRLAARGVKIRPGTVISYIVLKGSGRIGDRAIPADEFDPTKHRYDAEYYIENQVLPAVERILKAFGYRKEDLRYQKTKQVGSGAWLKVKGKKGTEAYVEQKLISEEDLNSAVDHHHHHH

SEQ ID NO: 623 - DNA, 2409 bp, Artificial Sequence
  Description of Artificial Sequence:Thermococcus species 9degreesN-7 mutant DNA polymerase, 9degreesN mutant
atgattctcgataccgactacatcaccgagaacgggaagcccgtgataagggtcttcaagaaggagaacggcgagtttaaaatcgagtacgacagaaccttcgagccctacttctacgcccttctgaaggacgattctgcgatagaggacgtcaagaaggtaaccgcaaagaggcacggaacggttgtcaaggtgaagcgcgccgagaaggtgcagaagaagttcctcggcaggccgatagaggtctggaagctctacttcaaccatcctcaggacgtcccggcgattcgagacaggatacgcgcccaccccgctgtcgttgacatctacgagtacgacatacccttcgccaagcgctacctcatcgacaagggcctgattccgatggagggcgacgaggagcttacgatgctcgccttcgcgatcgcaaccctctatcacgagggcgaggagttcggaaccgggccgattctcatgataagctacgccgacgggagcgaggcgagggtgataacctggaagaagattgaccttccgtacgttgacgtcgtctcgaccgagaaggagatgattaagcgcttcctccgcgtcgtcagggagaaggaccccgacgtgctcatcacctacaacggcgacaacttcgacttcgcctacctgaagaagcgctgtgaggaactcggaataaagttcacactcggcagggacgggagcgagccgaagatacagcgaatgggcgaccgctttgccgttgaggtgaagggcaggattcacttcgacctctaccccgtcataaggcgcacgataaacctcccgacctacacccttgaggccgtttacgaggccgtctttggaaagcccaaggagaaggtttacgcagaggagatagcgcaggcctgggagagcggggagggccttgaaagggttgcaagatactcgatggaggacgctaaggtgacctacgagctgggaagggagttcttcccgatggaggcccagctttcgaggcttataggccagagcctctgggacgtctcgcgctcgagcaccggaaatttggtggaggcattcctcctgcggaaggcctacaagaggaacgagctcgccccaaacaagcccgacgagagggagctcgcgagacggcgcgggggctacgctggcgggtacgttaaggaaccagagcggggattgtgggacaacattgtgtatttagacttccgctcgtggtatccttcaatcatcataacccacaacgtctcgccggataccctcaaccgcgagggctgtaaagagtacgacgtcgcccctgaggttggacacaagttctgcaaggacttccccggcttcataccaagcctcctgggagatttgctcgaggaggcgagcaagatagagcggaagatgaaggcaacggttgacccgctggagaagaaactcctcgtgtacaggcagtggcttataaaaatcctcgcctgcagcttctacggctactacggctacgccaaggcccggtggtactgcaaggagtgcgccgagagcgttacggcctggggaagggagtatatagaaatggttatccgggaactcgaagaaaaattcggttttaaagttctctatgccgatacagacggtctccatgctaccattcccggagcagacgctgaaacagtcaagaaaaaagcaaaggagttcttaaaatacattaatccaaaactgcccggcctgctcgaacttgagtacgagggcttctacgtgaggggcttcttcgtcacgaagaagaagtacgctgtgatagacgaggagggcaagataaccacgaggggtcttgagattgtgaggcgcgactggagcgagatagcgaaggagacccaggccagggtcttagaggcgatactcaagcacggtgacgtcgaggaggccgttaggatagtcaaggaagtgacggaaaagctgagcaagtatgaggtcccgcccgagaagctggtaatccacgagcagataacgcgcgatttgagggattacaaagccaccggcccgcacgttgccgttgcgaagaggctcgcggcgcgtggagtgaaaatccggcccggcacggtgataagctacatcgtcctaaagggctctggaaggataggcgacagggcgattccagctgatgagttcgacccgacgaagcaccgctacgatgcggaatactacatcgagaaccaggttctcccggcggtggagaggattctaaaagccttcggctatcggaaggaggatttgcgctaccagaagacgaagcaggtcggctcgggcgcgtggctgaaggtgaaggggaagaagggtaccgaagcttacgtagaacaaaaactcatctcagaagaggatctgaatagcgccgtcgaccatcatcatcatcatcattga

SEQ ID NO: 624 - protein, 802 aa, Artificial Sequence
  Description of Artificial Sequence:Thermococcus species 9degreesN-7 mutant DNA polymerase, 9degreesN mutant
MILDTDYITENGKPVIRVFKKENGEFKIEYDRTFEPYFYALLKDDSAIEDVKKVTAKRHGTVVKVKRAEKVQKKFLGRPIEVWKLYFNHPQDVPAIRDRIRAHPAVVDIYEYDIPFAKRYLIDKGLIPMEGDEELTMLAFAIATLYHEGEEFGTGPILMISYADGSEARVITWKKIDLPYVDVVSTEKEMIKRFLRVVREKDPDVLITYNGDNFDFAYLKKRCEELGIKFTLGRDGSEPKIQRMGDRFAVEVKGRIHFDLYPVIRRTINLPTYTLEAVYEAVFGKPKEKVYAEEIAQAWESGEGLERVARYSMEDAKVTYELGREFFPMEAQLSRLIGQSLWDVSRSSTGNLVEAFLLRKAYKRNELAPNKPDERELARRRGGYAGGYVKEPERGLWDNIVYLDFRSWYPSIIITHNVSPDTLNREGCKEYDVAPEVGHKFCKDFPGFIPSLLGDLLEEASKIERKMKATVDPLEKKLLVYRQWLIKILACSFYGYYGYAKARWYCKECAESVTAWGREYIEMVIRELEEKFGFKVLYADTDGLHATIPGADAETVKKKAKEFLKYINPKLPGLLELEYEGFYVRGFFVTKKKYAVIDEEGKITTRGLEIVRRDWSEIAKETQARVLEAILKHGDVEEAVRIVKEVTEKLSKYEVPPEKLVIHEQITRDLRDYKATGPHVAVAKRLAARGVKIRPGTVISYIVLKGSGRIGDRAIPADEFDPTKHRYDAEYYIENQVLPAVERILKAFGYRKEDLRYQKTKQVGSGAWLKVKGKKGTEAYVEQKLISEEDLNSAVDHHHHHH

SEQ ID NO: 625 - DNA, 2409 bp, Artificial Sequence
  Description of Artificial Sequence:Thermococcus species 9degreesN-7 mutant DNA polymerase, 9degreesN mutant
atgattctcgataccgactacatcaccgagaacgggaagcccgtgataagggtcttcaagaaggagaacggcgagtttaaaatcgagtacgacagaaccttcgagccctacttctacgcccttctgaaggacgattctgcgatagaggacgtcaagaaggtaaccgcaaagaggcacggaacggttgtcaaggtgaagcgcgccgagaaggtgcagaagaagttcctcggcaggccgatagaggtctggaagctctacttcaaccatcctcaggacgtcccggcgattcgagacaggatacgcgcccaccccgctgtcgttgacatctacgagtacgacatacccttcgccaagcgctacctcatcgacaagggcctgattccgatggagggcgacgaggagcttacgatgctcgccttcgcgatcgcaaccctctatcacgagggcgaggagttcggaaccgggccgattctcatgataagctacgccgacgggagcgaggcgagggtgataacctggaagaagattgaccttccgtacgttgacgtcgtctcgaccgagaaggagatgattaagcgcttcctccgcgtcgtcagggagaaggaccccgacgtgctcatcacctacaacggcgacaacttcgacttcgcctacctgaagaagcgctgtgaggaactcggaataaagttcacactcggcagggacgggagcgagccgaagatacagcgaatgggcgaccgctttgccgttgaggtgaagggcaggattcacttcgacctctaccccgtcataaggcgcacgataaacctcccgacctacacccttgaggccgtttacgaggccgtctttggaaagcccaaggagaaggtttacgcagaggagatagcgcaggcctgggagagcggggagggccttgaaagggttgcaagatactcgatggaggacgctaaggtgacctacgagctgggaagggagttcttcccgatggaggcccagctttcgaggcttataggccagagcctctgggacgtctcgcgctcgagcaccggaaatttggtggaggcattcctcctgcggaaggcctacaagaggaacgagctcgccccaaacaagcccgacgagagggagctcgcgagacggcgcgggggctacgctggcgggtacgttaaggaaccagagcggggattgtgggacaacattgtgtatttagacttccgctcgtggtatccttcaatcatcataacccacaacgtctcgccggataccctcaaccgcgagggctgtaaagagtacgacgtcgcccctgaggttggacacaagttctgcaaggacttccccggcttcataccaagcctcctgggagatttgctcgaggaggcgagcaagatagagcggaagatgaaggcaacggttgacccgctggagaagaaactcctcgtgtacaggcagtggcttataaaaatcctcgccaaaagcttctacggctactacggctacgccaaggcccggtggtactgcaaggagtgcgccgagagcgttacggcctggggaagggagtatatagaaatggttatccgggaactcgaagaaaaattcggttttaaagttctctatgccgatacagacggtctccatgctaccattcccggagcagacgctgaaacagtcaagaaaaaagcaaaggagttcttaaaatacattaatccaaaactgcccggcctgctcgaacttgagtacgagggcttctacgtgaggggcttcttcgtcacgaagaagaagtacgctgtgatagacgaggagggcaagataaccacgaggggtcttgagattgtgaggcgcgactggagcgagatagcgaaggagacccaggccagggtcttagaggcgatactcaagcacggtgacgtcgaggaggccgttaggatagtcaaggaagtgacggaaaagctgagcaagtatgaggtcccgcccgagaagctggtaatccacgagcagataacgcgcgatttgagggattacaaagccaccggcccgcacgttgccgttgcgaagaggctcgcggcgcgtggagtgaaaatccggcccggcacggtgataagctacatcgtcctaaagggctctggaaggataggcgacagggcgattccagctgatgagttcgacccgacgaagcaccgctacgatgcggaatactacatcgagaaccaggttctcccggcggtggagaggattctaaaagccttcggctatcggaaggaggatttgcgctaccagaagacgaagcaggtcggctcgggcgcgtggctgaaggtgaaggggaagaagggtaccgaagcttacgtagaacaaaaactcatctcagaagaggatctgaatagcgccgtcgaccatcatcatcatcatcattga

SEQ ID NO: 626 - protein, 802 aa, Artificial Sequence
  Description of Artificial Sequence:Thermococcus species 9degreesN-7 mutant DNA polymerase, 9degreesN mutant
MILDTDYITENGKPVIRVFKKENGEFKIEYDRTFEPYFYALLKDDSAIEDVKKVTAKRHGTVVKVKRAEKVQKKFLGRPIEVWKLYFNHPQDVPAIRDRIRAHPAVVDIYEYDIPFAKRYLIDKGLIPMEGDEELTMLAFAIATLYHEGEEFGTGPILMISYADGSEARVITWKKIDLPYVDVVSTEKEMIKRFLRVVREKDPDVLITYNGDNFDFAYLKKRCEELGIKFTLGRDGSEPKIQRMGDRFAVEVKGRIHFDLYPVIRRTINLPTYTLEAVYEAVFGKPKEKVYAEEIAQAWESGEGLERVARYSMEDAKVTYELGREFFPMEAQLSRLIGQSLWDVSRSSTGNLVEAFLLRKAYKRNELAPNKPDERELARRRGGYAGGYVKEPERGLWDNIVYLDFRSWYPSIIITHNVSPDTLNREGCKEYDVAPEVGHKFCKDFPGFIPSLLGDLLEEASKIERKMKATVDPLEKKLLVYRQWLIKILAKSFYGYYGYAKARWYCKECAESVTAWGREYIEMVIRELEEKFGFKVLYADTDGLHATIPGADAETVKKKAKEFLKYINPKLPGLLELEYEGFYVRGFFVTKKKYAVIDEEGKITTRGLEIVRRDWSEIAKETQARVLEAILKHGDVEEAVRIVKEVTEKLSKYEVPPEKLVIHEQITRDLRDYKATGPHVAVAKRLAARGVKIRPGTVISYIVLKGSGRIGDRAIPADEFDPTKHRYDAEYYIENQVLPAVERILKAFGYRKEDLRYQKTKQVGSGAWLKVKGKKGTEAYVEQKLISEEDLNSAVDHHHHHH

SEQ ID NO: 627 - DNA, 2409 bp, Artificial Sequence
  Description of Artificial Sequence:Thermococcus species 9degreesN-7 mutant DNA polymerase, 9degreesN mutant
atgattctcgataccgactacatcaccgagaacgggaagcccgtgataagggtcttcaagaaggagaacggcgagtttaaaatcgagtacgacagaaccttcgagccctacttctacgcccttctgaaggacgattctgcgatagaggacgtcaagaaggtaaccgcaaagaggcacggaacggttgtcaaggtgaagcgcgccgagaaggtgcagaagaagttcctcggcaggccgatagaggtctggaagctctacttcaaccatcctcaggacgtcccggcgattcgagacaggatacgcgcccaccccgctgtcgttgacatctacgagtacgacatacccttcgccaagcgctacctcatcgacaagggcctgattccgatggagggcgacgaggagcttacgatgctcgccttcgcgatcgcaaccctctatcacgagggcgaggagttcggaaccgggccgattctcatgataagctacgccgacgggagcgaggcgagggtgataacctggaagaagattgaccttccgtacgttgacgtcgtctcgaccgagaaggagatgattaagcgcttcctccgcgtcgtcagggagaaggaccccgacgtgctcatcacctacaacggcgacaacttcgacttcgcctacctgaagaagcgctgtgaggaactcggaataaagttcacactcggcagggacgggagcgagccgaagatacagcgaatgggcgaccgctttgccgttgaggtgaagggcaggattcacttcgacctctaccccgtcataaggcgcacgataaacctcccgacctacacccttgaggccgtttacgaggccgtctttggaaagcccaaggagaaggtttacgcagaggagatagcgcaggcctgggagagcggggagggccttgaaagggttgcaagatactcgatggaggacgctaaggtgacctacgagctgggaagggagttcttcccgatggaggcccagctttcgaggcttataggccagagcctctgggacgtctcgcgctcgagcaccggaaatttggtggaggcattcctcctgcggaaggcctacaagaggaacgagctcgccccaaacaagcccgacgagagggagctcgcgagacggcgcgggggctacgctggcgggtacgttaaggaaccagagcggggattgtgggacaacattgtgtatttagacttccgctcgtggtatccttcaatcatcataacccacaacgtctcgccggataccctcaaccgcgagggctgtaaagagtacgacgtcgcccctgaggttggacacaagttctgcaaggacttccccggcttcataccaagcctcctgggagatttgctcgaggaggcgagcaagatagagcggaagatgaaggcaacggttgacccgctggagaagaaactcctcgtgtacaggcagtggcttataaaaatcctcgcccagagcttctacggctactacggctacgccaaggcccggtggtactgcaaggagtgcgccgagagcgttacggcctggggaagggagtatatagaaatggttatccgggaactcgaagaaaaattcggttttaaagttctctatgccgatacagacggtctccatgctaccattcccggagcagacgctgaaacagtcaagaaaaaagcaaaggagttcttaaaatacattaatccaaaactgcccggcctgctcgaacttgagtacgagggcttctacgtgaggggcttcttcgtcacgaagaagaagtacgctgtgatagacgaggagggcaagataaccacgaggggtcttgagattgtgaggcgcgactggagcgagatagcgaaggagacccaggccagggtcttagaggcgatactcaagcacggtgacgtcgaggaggccgttaggatagtcaaggaagtgacggaaaagctgagcaagtatgaggtcccgcccgagaagctggtaatccacgagcagataacgcgcgatttgagggattacaaagccaccggcccgcacgttgccgttgcgaagaggctcgcggcgcgtggagtgaaaatccggcccggcacggtgataagctacatcgtcctaaagggctctggaaggataggcgacagggcgattccagctgatgagttcgacccgacgaagcaccgctacgatgcggaatactacatcgagaaccaggttctcccggcggtggagaggattctaaaagccttcggctatcggaaggaggatttgcgctaccagaagacgaagcaggtcggctcgggcgcgtggctgaaggtgaaggggaagaagggtaccgaagcttacgtagaacaaaaactcatctcagaagaggatctgaatagcgccgtcgaccatcatcatcatcatcattga

SEQ ID NO: 628 - protein, 802 aa, Artificial Sequence
  Description of Artificial Sequence:Thermococcus species 9degreesN-7 mutant DNA polymerase, 9degreesN mutant
MILDTDYITENGKPVIRVFKKENGEFKIEYDRTFEPYFYALLKDDSAIEDVKKVTAKRHGTVVKVKRAEKVQKKFLGRPIEVWKLYFNHPQDVPAIRDRIRAHPAVVDIYEYDIPFAKRYLIDKGLIPMEGDEELTMLAFAIATLYHEGEEFGTGPILMISYADGSEARVITWKKIDLPYVDVVSTEKEMIKRFLRVVREKDPDVLITYNGDNFDFAYLKKRCEELGIKFTLGRDGSEPKIQRMGDRFAVEVKGRIHFDLYPVIRRTINLPTYTLEAVYEAVFGKPKEKVYAEEIAQAWESGEGLERVARYSMEDAKVTYELGREFFPMEAQLSRLIGQSLWDVSRSSTGNLVEAFLLRKAYKRNELAPNKPDERELARRRGGYAGGYVKEPERGLWDNIVYLDFRSWYPSIIITHNVSPDTLNREGCKEYDVAPEVGHKFCKDFPGFIPSLLGDLLEEASKIERKMKATVDPLEKKLLVYRQWLIKILAQSFYGYYGYAKARWYCKECAESVTAWGREYIEMVIRELEEKFGFKVLYADTDGLHATIPGADAETVKKKAKEFLKYINPKLPGLLELEYEGFYVRGFFVTKKKYAVIDEEGKITTRGLEIVRRDWSEIAKETQARVLEAILKHGDVEEAVRIVKEVTEKLSKYEVPPEKLVIHEQITRDLRDYKATGPHVAVAKRLAARGVKIRPGTVISYIVLKGSGRIGDRAIPADEFDPTKHRYDAEYYIENQVLPAVERILKAFGYRKEDLRYQKTKQVGSGAWLKVKGKKGTEAYVEQKLISEEDLNSAVDHHHHHH

SEQ ID NO: 629 - DNA, 2409 bp, Artificial Sequence
  Description of Artificial Sequence:Thermococcus species 9degreesN-7 mutant DNA polymerase, 9degreesN mutant
atgattctcgataccgactacatcaccgagaacgggaagcccgtgataagggtcttcaagaaggagaacggcgagtttaaaatcgagtacgacagaaccttcgagccctacttctacgcccttctgaaggacgattctgcgatagaggacgtcaagaaggtaaccgcaaagaggcacggaacggttgtcaaggtgaagcgcgccgagaaggtgcagaagaagttcctcggcaggccgatagaggtctggaagctctacttcaaccatcctcaggacgtcccggcgattcgagacaggatacgcgcccaccccgctgtcgttgacatctacgagtacgacatacccttcgccaagcgctacctcatcgacaagggcctgattccgatggagggcgacgaggagcttacgatgctcgccttcgcgatcgcaaccctctatcacgagggcgaggagttcggaaccgggccgattctcatgataagctacgccgacgggagcgaggcgagggtgataacctggaagaagattgaccttccgtacgttgacgtcgtctcgaccgagaaggagatgattaagcgcttcctccgcgtcgtcagggagaaggaccccgacgtgctcatcacctacaacggcgacaacttcgacttcgcctacctgaagaagcgctgtgaggaactcggaataaagttcacactcggcagggacgggagcgagccgaagatacagcgaatgggcgaccgctttgccgttgaggtgaagggcaggattcacttcgacctctaccccgtcataaggcgcacgataaacctcccgacctacacccttgaggccgtttacgaggccgtctttggaaagcccaaggagaaggtttacgcagaggagatagcgcaggcctgggagagcggggagggccttgaaagggttgcaagatactcgatggaggacgctaaggtgacctacgagctgggaagggagttcttcccgatggaggcccagctttcgaggcttataggccagagcctctgggacgtctcgcgctcgagcaccggaaatttggtggaggcattcctcctgcggaaggcctacaagaggaacgagctcgccccaaacaagcccgacgagagggagctcgcgagacggcgcgggggctacgctggcgggtacgttaaggaaccagagcggggattgtgggacaacattgtgtatttagacttccgctcgtggtatccttcaatcatcataacccacaacgtctcgccggataccctcaaccgcgagggctgtaaagagtacgacgtcgcccctgaggttggacacaagttctgcaaggacttccccggcttcataccaagcctcctgggagatttgctcgaggaggcgagcaagatagagcggaagatgaaggcaacggttgacccgctggagaagaaactcctcgtgtacaggcagtggcttataaaaatcctcgccgttagcttctacggctactacggctacgccaaggcccggtggtactgcaaggagtgcgccgagagcgttacggcctggggaagggagtatatagaaatggttatccgggaactcgaagaaaaattcggttttaaagttctctatgccgatacagacggtctccatgctaccattcccggagcagacgctgaaacagtcaagaaaaaagcaaaggagttcttaaaatacattaatccaaaactgcccggcctgctcgaacttgagtacgagggcttctacgtgaggggcttcttcgtcacgaagaagaagtacgctgtgatagacgaggagggcaagataaccacgaggggtcttgagattgtgaggcgcgactggagcgagatagcgaaggagacccaggccagggtcttagaggcgatactcaagcacggtgacgtcgaggaggccgttaggatagtcaaggaagtgacggaaaagctgagcaagtatgaggtcccgcccgagaagctggtaatccacgagcagataacgcgcgatttgagggattacaaagccaccggcccgcacgttgccgttgcgaagaggctcgcggcgcgtggagtgaaaatccggcccggcacggtgataagctacatcgtcctaaagggctctggaaggataggcgacagggcgattccagctgatgagttcgacccgacgaagcaccgctacgatgcggaatactacatcgagaaccaggttctcccggcggtggagaggattctaaaagccttcggctatcggaaggaggatttgcgctaccagaagacgaagcaggtcggctcgggcgcgtggctgaaggtgaaggggaagaagggtaccgaagcttacgtagaacaaaaactcatctcagaagaggatctgaatagcgccgtcgaccatcatcatcatcatcattga

SEQ ID NO: 630 - protein, 802 aa, Artificial Sequence
  Description of Artificial Sequence:Thermococcus species 9degreesN-7 mutant DNA polymerase, 9degreesN mutant
MILDTDYITENGKPVIRVFKKENGEFKIEYDRTFEPYFYALLKDDSAIEDVKKVTAKRHGTVVKVKRAEKVQKKFLGRPIEVWKLYFNHPQDVPAIRDRIRAHPAVVDIYEYDIPFAKRYLIDKGLIPMEGDEELTMLAFAIATLYHEGEEFGTGPILMISYADGSEARVITWKKIDLPYVDVVSTEKEMIKRFLRVVREKDPDVLITYNGDNFDFAYLKKRCEELGIKFTLGRDGSEPKIQRMGDRFAVEVKGRIHFDLYPVIRRTINLPTYTLEAVYEAVFGKPKEKVYAEEIAQAWESGEGLERVARYSMEDAKVTYELGREFFPMEAQLSRLIGQSLWDVSRSSTGNLVEAFLLRKAYKRNELAPNKPDERELARRRGGYAGGYVKEPERGLWDNIVYLDFRSWYPSIIITHNVSPDTLNREGCKEYDVAPEVGHKFCKDFPGFIPSLLGDLLEEASKIERKMKATVDPLEKKLLVYRQWLIKILAVSFYGYYGYAKARWYCKECAESVTAWGREYIEMVIRELEEKFGFKVLYADTDGLHATIPGADAETVKKKAKEFLKYINPKLPGLLELEYEGFYVRGFFVTKKKYAVIDEEGKITTRGLEIVRRDWSEIAKETQARVLEAILKHGDVEEAVRIVKEVTEKLSKYEVPPEKLVIHEQITRDLRDYKATGPHVAVAKRLAARGVKIRPGTVISYIVLKGSGRIGDRAIPADEFDPTKHRYDAEYYIENQVLPAVERILKAFGYRKEDLRYQKTKQVGSGAWLKVKGKKGTEAYVEQKLISEEDLNSAVDHHHHHH

SEQ ID NO: 631 - DNA, 2409 bp, Artificial Sequence
  Description of Artificial Sequence:Thermococcus species 9degreesN-7 mutant DNA polymerase, 9degreesN mutant
atgattctcgataccgactacatcaccgagaacgggaagcccgtgataagggtcttcaagaaggagaacggcgagtttaaaatcgagtacgacagaaccttcgagccctacttctacgcccttctgaaggacgattctgcgatagaggacgtcaagaaggtaaccgcaaagaggcacggaacggttgtcaaggtgaagcgcgccgagaaggtgcagaagaagttcctcggcaggccgatagaggtctggaagctctacttcaaccatcctcaggacgtcccggcgattcgagacaggatacgcgcccaccccgctgtcgttgacatctacgagtacgacatacccttcgccaagcgctacctcatcgacaagggcctgattccgatggagggcgacgaggagcttacgatgctcgccttcgcgatcgcaaccctctatcacgagggcgaggagttcggaaccgggccgattctcatgataagctacgccgacgggagcgaggcgagggtgataacctggaagaagattgaccttccgtacgttgacgtcgtctcgaccgagaaggagatgattaagcgcttcctccgcgtcgtcagggagaaggaccccgacgtgctcatcacctacaacggcgacaacttcgacttcgcctacctgaagaagcgctgtgaggaactcggaataaagttcacactcggcagggacgggagcgagccgaagatacagcgaatgggcgaccgctttgccgttgaggtgaagggcaggattcacttcgacctctaccccgtcataaggcgcacgataaacctcccgacctacacccttgaggccgtttacgaggccgtctttggaaagcccaaggagaaggtttacgcagaggagatagcgcaggcctgggagagcggggagggccttgaaagggttgcaagatactcgatggaggacgctaaggtgacctacgagctgggaagggagttcttcccgatggaggcccagctttcgaggcttataggccagagcctctgggacgtctcgcgctcgagcaccggaaatttggtggaggcattcctcctgcggaaggcctacaagaggaacgagctcgccccaaacaagcccgacgagagggagctcgcgagacggcgcgggggctacgctggcgggtacgttaaggaaccagagcggggattgtgggacaacattgtgtatttagacttccgctcgtggtatccttcaatcatcataacccacaacgtctcgccggataccctcaaccgcgagggctgtaaagagtacgacgtcgcccctgaggttggacacaagttctgcaaggacttccccggcttcataccaagcctcctgggagatttgctcgaggaggcgagcaagatagagcggaagatgaaggcaacggttgacccgctggagaagaaactcctcgtgtacaggcagtggcttataaaaatcctcgccgagagcttctacggctactacggctacgccaaggcccggtggtactgcaaggagtgcgccgagagcgttacggcctggggaagggagtatatagaaatggttatccgggaactcgaagaaaaattcggttttaaagttctctatgccgatacagacggtctccatgctaccattcccggagcagacgctgaaacagtcaagaaaaaagcaaaggagttcttaaaatacattaatccaaaactgcccggcctgctcgaacttgagtacgagggcttctacgtgaggggcttcttcgtcacgaagaagaagtacgctgtgatagacgaggagggcaagataaccacgaggggtcttgagattgtgaggcgcgactggagcgagatagcgaaggagacccaggccagggtcttagaggcgatactcaagcacggtgacgtcgaggaggccgttaggatagtcaaggaagtgacggaaaagctgagcaagtatgaggtcccgcccgagaagctggtaatccacgagcagataacgcgcgatttgagggattacaaagccaccggcccgcacgttgccgttgcgaagaggctcgcggcgcgtggagtgaaaatccggcccggcacggtgataagctacatcgtcctaaagggctctggaaggataggcgacagggcgattccagctgatgagttcgacccgacgaagcaccgctacgatgcggaatactacatcgagaaccaggttctcccggcggtggagaggattctaaaagccttcggctatcggaaggaggatttgcgctaccagaagacgaagcaggtcggctcgggcgcgtggctgaaggtgaaggggaagaagggtaccgaagcttacgtagaacaaaaactcatctcagaagaggatctgaatagcgccgtcgaccatcatcatcatcatcattga

SEQ ID NO: 632 - protein, 802 aa, Artificial Sequence
  Description of Artificial Sequence:Thermococcus species 9degreesN-7 mutant DNA polymerase, 9degreesN mutant
MILDTDYITENGKPVIRVFKKENGEFKIEYDRTFEPYFYALLKDDSAIEDVKKVTAKRHGTVVKVKRAEKVQKKFLGRPIEVWKLYFNHPQDVPAIRDRIRAHPAVVDIYEYDIPFAKRYLIDKGLIPMEGDEELTMLAFAIATLYHEGEEFGTGPILMISYADGSEARVITWKKIDLPYVDVVSTEKEMIKRFLRVVREKDPDVLITYNGDNFDFAYLKKRCEELGIKFTLGRDGSEPKIQRMGDRFAVEVKGRIHFDLYPVIRRTINLPTYTLEAVYEAVFGKPKEKVYAEEIAQAWESGEGLERVARYSMEDAKVTYELGREFFPMEAQLSRLIGQSLWDVSRSSTGNLVEAFLLRKAYKRNELAPNKPDERELARRRGGYAGGYVKEPERGLWDNIVYLDFRSWYPSIIITHNVSPDTLNREGCKEYDVAPEVGHKFCKDFPGFIPSLLGDLLEEASKIERKMKATVDPLEKKLLVYRQWLIKILAESFYGYYGYAKARWYCKECAESVTAWGREYIEMVIRELEEKFGFKVLYADTDGLHATIPGADAETVKKKAKEFLKYINPKLPGLLELEYEGFYVRGFFVTKKKYAVIDEEGKITTRGLEIVRRDWSEIAKETQARVLEAILKHGDVEEAVRIVKEVTEKLSKYEVPPEKLVIHEQITRDLRDYKATGPHVAVAKRLAARGVKIRPGTVISYIVLKGSGRIGDRAIPADEFDPTKHRYDAEYYIENQVLPAVERILKAFGYRKEDLRYQKTKQVGSGAWLKVKGKKGTEAYVEQKLISEEDLNSAVDHHHHHH

SEQ ID NO: 633 - DNA, 2409 bp, Artificial Sequence
  Description of Artificial Sequence:Thermococcus species 9degreesN-7 mutant DNA polymerase, 9degreesN mutant
atgattctcgataccgactacatcaccgagaacgggaagcccgtgataagggtcttcaagaaggagaacggcgagtttaaaatcgagtacgacagaaccttcgagccctacttctacgcccttctgaaggacgattctgcgatagaggacgtcaagaaggtaaccgcaaagaggcacggaacggttgtcaaggtgaagcgcgccgagaaggtgcagaagaagttcctcggcaggccgatagaggtctggaagctctacttcaaccatcctcaggacgtcccggcgattcgagacaggatacgcgcccaccccgctgtcgttgacatctacgagtacgacatacccttcgccaagcgctacctcatcgacaagggcctgattccgatggagggcgacgaggagcttacgatgctcgccttcgcgatcgcaaccctctatcacgagggcgaggagttcggaaccgggccgattctcatgataagctacgccgacgggagcgaggcgagggtgataacctggaagaagattgaccttccgtacgttgacgtcgtctcgaccgagaaggagatgattaagcgcttcctccgcgtcgtcagggagaaggaccccgacgtgctcatcacctacaacggcgacaacttcgacttcgcctacctgaagaagcgctgtgaggaactcggaataaagttcacactcggcagggacgggagcgagccgaagatacagcgaatgggcgaccgctttgccgttgaggtgaagggcaggattcacttcgacctctaccccgtcataaggcgcacgataaacctcccgacctacacccttgaggccgtttacgaggccgtctttggaaagcccaaggagaaggtttacgcagaggagatagcgcaggcctgggagagcggggagggccttgaaagggttgcaagatactcgatggaggacgctaaggtgacctacgagctgggaagggagttcttcccgatggaggcccagctttcgaggcttataggccagagcctctgggacgtctcgcgctcgagcaccggaaatttggtggaggcattcctcctgcggaaggcctacaagaggaacgagctcgccccaaacaagcccgacgagagggagctcgcgagacggcgcgggggctacgctggcgggtacgttaaggaaccagagcggggattgtgggacaacattgtgtatttagacttccgctcgtggtatccttcaatcatcataacccacaacgtctcgccggataccctcaaccgcgagggctgtaaagagtacgacgtcgcccctgaggttggacacaagttctgcaaggacttccccggcttcataccaagcctcctgggagatttgctcgaggaggcgagcaagatagagcggaagatgaaggcaacggttgacccgctggagaagaaactcctcgtgtacaggcagtggcttataaaaatcctcgccatgagcttctacggctactacggctacgccaaggcccggtggtactgcaaggagtgcgccgagagcgttacggcctggggaagggagtatatagaaatggttatccgggaactcgaagaaaaattcggttttaaagttctctatgccgatacagacggtctccatgctaccattcccggagcagacgctgaaacagtcaagaaaaaagcaaaggagttcttaaaatacattaatccaaaactgcccggcctgctcgaacttgagtacgagggcttctacgtgaggggcttcttcgtcacgaagaagaagtacgctgtgatagacgaggagggcaagataaccacgaggggtcttgagattgtgaggcgcgactggagcgagatagcgaaggagacccaggccagggtcttagaggcgatactcaagcacggtgacgtcgaggaggccgttaggatagtcaaggaagtgacggaaaagctgagcaagtatgaggtcccgcccgagaagctggtaatccacgagcagataacgcgcgatttgagggattacaaagccaccggcccgcacgttgccgttgcgaagaggctcgcggcgcgtggagtgaaaatccggcccggcacggtgataagctacatcgtcctaaagggctctggaaggataggcgacagggcgattccagctgatgagttcgacccgacgaagcaccgctacgatgcggaatactacatcgagaaccaggttctcccggcggtggagaggattctaaaagccttcggctatcggaaggaggatttgcgctaccagaagacgaagcaggtcggctcgggcgcgtggctgaaggtgaaggggaagaagggtaccgaagcttacgtagaacaaaaactcatctcagaagaggatctgaatagcgccgtcgaccatcatcatcatcatcattga

SEQ ID NO: 634 - protein, 802 aa, Artificial Sequence
  Description of Artificial Sequence:Thermococcus species 9degreesN-7 mutant DNA polymerase, 9degreesN mutant
MILDTDYITENGKPVIRVFKKENGEFKIEYDRTFEPYFYALLKDDSAIEDVKKVTAKRHGTVVKVKRAEKVQKKFLGRPIEVWKLYFNHPQDVPAIRDRIRAHPAVVDIYEYDIPFAKRYLIDKGLIPMEGDEELTMLAFAIATLYHEGEEFGTGPILMISYADGSEARVITWKKIDLPYVDVVSTEKEMIKRFLRVVREKDPDVLITYNGDNFDFAYLKKRCEELGIKFTLGRDGSEPKIQRMGDRFAVEVKGRIHFDLYPVIRRTINLPTYTLEAVYEAVFGKPKEKVYAEEIAQAWESGEGLERVARYSMEDAKVTYELGREFFPMEAQLSRLIGQSLWDVSRSSTGNLVEAFLLRKAYKRNELAPNKPDERELARRRGGYAGGYVKEPERGLWDNIVYLDFRSWYPSIIITHNVSPDTLNREGCKEYDVAPEVGHKFCKDFPGFIPSLLGDLLEEASKIERKMKATVDPLEKKLLVYRQWLIKILAMSFYGYYGYAKARWYCKECAESVTAWGREYIEMVIRELEEKFGFKVLYADTDGLHATIPGADAETVKKKAKEFLKYINPKLPGLLELEYEGFYVRGFFVTKKKYAVIDEEGKITTRGLEIVRRDWSEIAKETQARVLEAILKHGDVEEAVRIVKEVTEKLSKYEVPPEKLVIHEQITRDLRDYKATGPHVAVAKRLAARGVKIRPGTVISYIVLKGSGRIGDRAIPADEFDPTKHRYDAEYYIENQVLPAVERILKAFGYRKEDLRYQKTKQVGSGAWLKVKGKKGTEAYVEQKLISEEDLNSAVDHHHHHH

SEQ ID NO: 635 - DNA, 2409 bp, Artificial Sequence
  Description of Artificial Sequence:Thermococcus species 9degreesN-7 mutant DNA polymerase, 9degreesN mutant
atgattctcgataccgactacatcaccgagaacgggaagcccgtgataagggtcttcaagaaggagaacggcgagtttaaaatcgagtacgacagaaccttcgagccctacttctacgcccttctgaaggacgattctgcgatagaggacgtcaagaaggtaaccgcaaagaggcacggaacggttgtcaaggtgaagcgcgccgagaaggtgcagaagaagttcctcggcaggccgatagaggtctggaagctctacttcaaccatcctcaggacgtcccggcgattcgagacaggatacgcgcccaccccgctgtcgttgacatctacgagtacgacatacccttcgccaagcgctacctcatcgacaagggcctgattccgatggagggcgacgaggagcttacgatgctcgccttcgcgatcgcaaccctctatcacgagggcgaggagttcggaaccgggccgattctcatgataagctacgccgacgggagcgaggcgagggtgataacctggaagaagattgaccttccgtacgttgacgtcgtctcgaccgagaaggagatgattaagcgcttcctccgcgtcgtcagggagaaggaccccgacgtgctcatcacctacaacggcgacaacttcgacttcgcctacctgaagaagcgctgtgaggaactcggaataaagttcacactcggcagggacgggagcgagccgaagatacagcgaatgggcgaccgctttgccgttgaggtgaagggcaggattcacttcgacctctaccccgtcataaggcgcacgataaacctcccgacctacacccttgaggccgtttacgaggccgtctttggaaagcccaaggagaaggtttacgcagaggagatagcgcaggcctgggagagcggggagggccttgaaagggttgcaagatactcgatggaggacgctaaggtgacctacgagctgggaagggagttcttcccgatggaggcccagctttcgaggcttataggccagagcctctgggacgtctcgcgctcgagcaccggaaatttggtggaggcattcctcctgcggaaggcctacaagaggaacgagctcgccccaaacaagcccgacgagagggagctcgcgagacggcgcgggggctacgctggcgggtacgttaaggaaccagagcggggattgtgggacaacattgtgtatttagacttccgctcgtggtatccttcaatcatcataacccacaacgtctcgccggataccctcaaccgcgagggctgtaaagagtacgacgtcgcccctgaggttggacacaagttctgcaaggacttccccggcttcataccaagcctcctgggagatttgctcgaggaggcgagcaagatagagcggaagatgaaggcaacggttgacccgctggagaagaaactcctcgtgtacaggcagtggcttataaaaatcctcgcctctagcttctacggctactacggctacgccaaggcccggtggtactgcaaggagtgcgccgagagcgttacggcctggggaagggagtatatagaaatggttatccgggaactcgaagaaaaattcggttttaaagttctctatgccgatacagacggtctccatgctaccattcccggagcagacgctgaaacagtcaagaaaaaagcaaaggagttcttaaaatacattaatccaaaactgcccggcctgctcgaacttgagtacgagggcttctacgtgaggggcttcttcgtcacgaagaagaagtacgctgtgatagacgaggagggcaagataaccacgaggggtcttgagattgtgaggcgcgactggagcgagatagcgaaggagacccaggccagggtcttagaggcgatactcaagcacggtgacgtcgaggaggccgttaggatagtcaaggaagtgacggaaaagctgagcaagtatgaggtcccgcccgagaagctggtaatccacgagcagataacgcgcgatttgagggattacaaagccaccggcccgcacgttgccgttgcgaagaggctcgcggcgcgtggagtgaaaatccggcccggcacggtgataagctacatcgtcctaaagggctctggaaggataggcgacagggcgattccagctgatgagttcgacccgacgaagcaccgctacgatgcggaatactacatcgagaaccaggttctcccggcggtggagaggattctaaaagccttcggctatcggaaggaggatttgcgctaccagaagacgaagcaggtcggctcgggcgcgtggctgaaggtgaaggggaagaagggtaccgaagcttacgtagaacaaaaactcatctcagaagaggatctgaatagcgccgtcgaccatcatcatcatcatcattga

SEQ ID NO: 636 - protein, 802 aa, Artificial Sequence
  Description of Artificial Sequence:Thermococcus species 9degreesN-7 mutant DNA polymerase, 9degreesN mutant
MILDTDYITENGKPVIRVFKKENGEFKIEYDRTFEPYFYALLKDDSAIEDVKKVTAKRHGTVVKVKRAEKVQKKFLGRPIEVWKLYFNHPQDVPAIRDRIRAHPAVVDIYEYDIPFAKRYLIDKGLIPMEGDEELTMLAFAIATLYHEGEEFGTGPILMISYADGSEARVITWKKIDLPYVDVVSTEKEMIKRFLRVVREKDPDVLITYNGDNFDFAYLKKRCEELGIKFTLGRDGSEPKIQRMGDRFAVEVKGRIHFDLYPVIRRTINLPTYTLEAVYEAVFGKPKEKVYAEEIAQAWESGEGLERVARYSMEDAKVTYELGREFFPMEAQLSRLIGQSLWDVSRSSTGNLVEAFLLRKAYKRNELAPNKPDERELARRRGGYAGGYVKEPERGLWDNIVYLDFRSWYPSIIITHNVSPDTLNREGCKEYDVAPEVGHKFCKDFPGFIPSLLGDLLEEASKIERKMKATVDPLEKKLLVYRQWLIKILASSFYGYYGYAKARWYCKECAESVTAWGREYIEMVIRELEEKFGFKVLYADTDGLHATIPGADAETVKKKAKEFLKYINPKLPGLLELEYEGFYVRGFFVTKKKYAVIDEEGKITTRGLEIVRRDWSEIAKETQARVLEAILKHGDVEEAVRIVKEVTEKLSKYEVPPEKLVIHEQITRDLRDYKATGPHVAVAKRLAARGVKIRPGTVISYIVLKGSGRIGDRAIPADEFDPTKHRYDAEYYIENQVLPAVERILKAFGYRKEDLRYQKTKQVGSGAWLKVKGKKGTEAYVEQKLISEEDLNSAVDHHHHHH

SEQ ID NO: 637 - DNA, 2409 bp, Artificial Sequence
  Description of Artificial Sequence:Thermococcus species 9degreesN-7 mutant DNA polymerase, 9degreesN mutant
atgattctcgataccgactacatcaccgagaacgggaagcccgtgataagggtcttcaagaaggagaacggcgagtttaaaatcgagtacgacagaaccttcgagccctacttctacgcccttctgaaggacgattctgcgatagaggacgtcaagaaggtaaccgcaaagaggcacggaacggttgtcaaggtgaagcgcgccgagaaggtgcagaagaagttcctcggcaggccgatagaggtctggaagctctacttcaaccatcctcaggacgtcccggcgattcgagacaggatacgcgcccaccccgctgtcgttgacatctacgagtacgacatacccttcgccaagcgctacctcatcgacaagggcctgattccgatggagggcgacgaggagcttacgatgctcgccttcgcgatcgcaaccctctatcacgagggcgaggagttcggaaccgggccgattctcatgataagctacgccgacgggagcgaggcgagggtgataacctggaagaagattgaccttccgtacgttgacgtcgtctcgaccgagaaggagatgattaagcgcttcctccgcgtcgtcagggagaaggaccccgacgtgctcatcacctacaacggcgacaacttcgacttcgcctacctgaagaagcgctgtgaggaactcggaataaagttcacactcggcagggacgggagcgagccgaagatacagcgaatgggcgaccgctttgccgttgaggtgaagggcaggattcacttcgacctctaccccgtcataaggcgcacgataaacctcccgacctacacccttgaggccgtttacgaggccgtctttggaaagcccaaggagaaggtttacgcagaggagatagcgcaggcctgggagagcggggagggccttgaaagggttgcaagatactcgatggaggacgctaaggtgacctacgagctgggaagggagttcttcccgatggaggcccagctttcgaggcttataggccagagcctctgggacgtctcgcgctcgagcaccggaaatttggtggaggcattcctcctgcggaaggcctacaagaggaacgagctcgccccaaacaagcccgacgagagggagctcgcgagacggcgcgggggctacgctggcgggtacgttaaggaaccagagcggggattgtgggacaacattgtgtatttagacttccgctcgtggtatccttcaatcatcataacccacaacgtctcgccggataccctcaaccgcgagggctgtaaagagtacgacgtcgcccctgaggttggacacaagttctgcaaggacttccccggcttcataccaagcctcctgggagatttgctcgaggaggcgagcaagatagagcggaagatgaaggcaacggttgacccgctggagaagaaactcctcgtgtacaggcagtggcttataaaaatcctcgcctggagcttctacggctactacggctacgccaaggcccggtggtactgcaaggagtgcgccgagagcgttacggcctggggaagggagtatatagaaatggttatccgggaactcgaagaaaaattcggttttaaagttctctatgccgatacagacggtctccatgctaccattcccggagcagacgctgaaacagtcaagaaaaaagcaaaggagttcttaaaatacattaatccaaaactgcccggcctgctcgaacttgagtacgagggcttctacgtgaggggcttcttcgtcacgaagaagaagtacgctgtgatagacgaggagggcaagataaccacgaggggtcttgagattgtgaggcgcgactggagcgagatagcgaaggagacccaggccagggtcttagaggcgatactcaagcacggtgacgtcgaggaggccgttaggatagtcaaggaagtgacggaaaagctgagcaagtatgaggtcccgcccgagaagctggtaatccacgagcagataacgcgcgatttgagggattacaaagccaccggcccgcacgttgccgttgcgaagaggctcgcggcgcgtggagtgaaaatccggcccggcacggtgataagctacatcgtcctaaagggctctggaaggataggcgacagggcgattccagctgatgagttcgacccgacgaagcaccgctacgatgcggaatactacatcgagaaccaggttctcccggcggtggagaggattctaaaagccttcggctatcggaaggaggatttgcgctaccagaagacgaagcaggtcggctcgggcgcgtggctgaaggtgaaggggaagaagggtaccgaagcttacgtagaacaaaaactcatctcagaagaggatctgaatagcgccgtcgaccatcatcatcatcatcattga

SEQ ID NO: 638 - protein, 802 aa, Artificial Sequence
  Description of Artificial Sequence:Thermococcus species 9degreesN-7 mutant DNA polymerase, 9degreesN mutant
MILDTDYITENGKPVIRVFKKENGEFKIEYDRTFEPYFYALLKDDSAIEDVKKVTAKRHGTVVKVKRAEKVQKKFLGRPIEVWKLYFNHPQDVPAIRDRIRAHPAVVDIYEYDIPFAKRYLIDKGLIPMEGDEELTMLAFAIATLYHEGEEFGTGPILMISYADGSEARVITWKKIDLPYVDVVSTEKEMIKRFLRVVREKDPDVLITYNGDNFDFAYLKKRCEELGIKFTLGRDGSEPKIQRMGDRFAVEVKGRIHFDLYPVIRRTINLPTYTLEAVYEAVFGKPKEKVYAEEIAQAWESGEGLERVARYSMEDAKVTYELGREFFPMEAQLSRLIGQSLWDVSRSSTGNLVEAFLLRKAYKRNELAPNKPDERELARRRGGYAGGYVKEPERGLWDNIVYLDFRSWYPSIIITHNVSPDTLNREGCKEYDVAPEVGHKFCKDFPGFIPSLLGDLLEEASKIERKMKATVDPLEKKLLVYRQWLIKILAWSFYGYYGYAKARWYCKECAESVTAWGREYIEMVIRELEEKFGFKVLYADTDGLHATIPGADAETVKKKAKEFLKYINPKLPGLLELEYEGFYVRGFFVTKKKYAVIDEEGKITTRGLEIVRRDWSEIAKETQARVLEAILKHGDVEEAVRIVKEVTEKLSKYEVPPEKLVIHEQITRDLRDYKATGPHVAVAKRLAARGVKIRPGTVISYIVLKGSGRIGDRAIPADEFDPTKHRYDAEYYIENQVLPAVERILKAFGYRKEDLRYQKTKQVGSGAWLKVKGKKGTEAYVEQKLISEEDLNSAVDHHHHHH

SEQ ID NO: 639 - DNA, 2409 bp, Artificial Sequence
  Description of Artificial Sequence:Thermococcus species 9degreesN-7 mutant DNA polymerase, 9degreesN mutant
atgattctcgataccgactacatcaccgagaacgggaagcccgtgataagggtcttcaagaaggagaacggcgagtttaaaatcgagtacgacagaaccttcgagccctacttctacgcccttctgaaggacgattctgcgatagaggacgtcaagaaggtaaccgcaaagaggcacggaacggttgtcaaggtgaagcgcgccgagaaggtgcagaagaagttcctcggcaggccgatagaggtctggaagctctacttcaaccatcctcaggacgtcccggcgattcgagacaggatacgcgcccaccccgctgtcgttgacatctacgagtacgacatacccttcgccaagcgctacctcatcgacaagggcctgattccgatggagggcgacgaggagcttacgatgctcgccttcgcgatcgcaaccctctatcacgagggcgaggagttcggaaccgggccgattctcatgataagctacgccgacgggagcgaggcgagggtgataacctggaagaagattgaccttccgtacgttgacgtcgtctcgaccgagaaggagatgattaagcgcttcctccgcgtcgtcagggagaaggaccccgacgtgctcatcacctacaacggcgacaacttcgacttcgcctacctgaagaagcgctgtgaggaactcggaataaagttcacactcggcagggacgggagcgagccgaagatacagcgaatgggcgaccgctttgccgttgaggtgaagggcaggattcacttcgacctctaccccgtcataaggcgcacgataaacctcccgacctacacccttgaggccgtttacgaggccgtctttggaaagcccaaggagaaggtttacgcagaggagatagcgcaggcctgggagagcggggagggccttgaaagggttgcaagatactcgatggaggacgctaaggtgacctacgagctgggaagggagttcttcccgatggaggcccagctttcgaggcttataggccagagcctctgggacgtctcgcgctcgagcaccggaaatttggtggaggcattcctcctgcggaaggcctacaagaggaacgagctcgccccaaacaagcccgacgagagggagctcgcgagacggcgcgggggctacgctggcgggtacgttaaggaaccagagcggggattgtgggacaacattgtgtatttagacttccgctcgtggtatccttcaatcatcataacccacaacgtctcgccggataccctcaaccgcgagggctgtaaagagtacgacgtcgcccctgaggttggacacaagttctgcaaggacttccccggcttcataccaagcctcctgggagatttgctcgaggaggcgagcaagatagagcggaagatgaaggcaacggttgacccgctggagaagaaactcctcgtgtacaggcagtggcttataaaaatcctcgccccgagcttctacggctactacggctacgccaaggcccggtggtactgcaaggagtgcgccgagagcgttacggcctggggaagggagtatatagaaatggttatccgggaactcgaagaaaaattcggttttaaagttctctatgccgatacagacggtctccatgctaccattcccggagcagacgctgaaacagtcaagaaaaaagcaaaggagttcttaaaatacattaatccaaaactgcccggcctgctcgaacttgagtacgagggcttctacgtgaggggcttcttcgtcacgaagaagaagtacgctgtgatagacgaggagggcaagataaccacgaggggtcttgagattgtgaggcgcgactggagcgagatagcgaaggagacccaggccagggtcttagaggcgatactcaagcacggtgacgtcgaggaggccgttaggatagtcaaggaagtgacggaaaagctgagcaagtatgaggtcccgcccgagaagctggtaatccacgagcagataacgcgcgatttgagggattacaaagccaccggcccgcacgttgccgttgcgaagaggctcgcggcgcgtggagtgaaaatccggcccggcacggtgataagctacatcgtcctaaagggctctggaaggataggcgacagggcgattccagctgatgagttcgacccgacgaagcaccgctacgatgcggaatactacatcgagaaccaggttctcccggcggtggagaggattctaaaagccttcggctatcggaaggaggatttgcgctaccagaagacgaagcaggtcggctcgggcgcgtggctgaaggtgaaggggaagaagggtaccgaagcttacgtagaacaaaaactcatctcagaagaggatctgaatagcgccgtcgaccatcatcatcatcatcattga

SEQ ID NO: 640 - protein, 802 aa, Artificial Sequence
  Description of Artificial Sequence:Thermococcus species 9degreesN-7 mutant DNA polymerase, 9degreesN mutant
MILDTDYITENGKPVIRVFKKENGEFKIEYDRTFEPYFYALLKDDSAIEDVKKVTAKRHGTVVKVKRAEKVQKKFLGRPIEVWKLYFNHPQDVPAIRDRIRAHPAVVDIYEYDIPFAKRYLIDKGLIPMEGDEELTMLAFAIATLYHEGEEFGTGPILMISYADGSEARVITWKKIDLPYVDVVSTEKEMIKRFLRVVREKDPDVLITYNGDNFDFAYLKKRCEELGIKFTLGRDGSEPKIQRMGDRFAVEVKGRIHFDLYPVIRRTINLPTYTLEAVYEAVFGKPKEKVYAEEIAQAWESGEGLERVARYSMEDAKVTYELGREFFPMEAQLSRLIGQSLWDVSRSSTGNLVEAFLLRKAYKRNELAPNKPDERELARRRGGYAGGYVKEPERGLWDNIVYLDFRSWYPSIIITHNVSPDTLNREGCKEYDVAPEVGHKFCKDFPGFIPSLLGDLLEEASKIERKMKATVDPLEKKLLVYRQWLIKILAPSFYGYYGYAKARWYCKECAESVTAWGREYIEMVIRELEEKFGFKVLYADTDGLHATIPGADAETVKKKAKEFLKYINPKLPGLLELEYEGFYVRGFFVTKKKYAVIDEEGKITTRGLEIVRRDWSEIAKETQARVLEAILKHGDVEEAVRIVKEVTEKLSKYEVPPEKLVIHEQITRDLRDYKATGPHVAVAKRLAARGVKIRPGTVISYIVLKGSGRIGDRAIPADEFDPTKHRYDAEYYIENQVLPAVERILKAFGYRKEDLRYQKTKQVGSGAWLKVKGKKGTEAYVEQKLISEEDLNSAVDHHHHHH

SEQ ID NO: 641 - DNA, 2409 bp, Artificial Sequence
  Description of Artificial Sequence:Thermococcus species 9degreesN-7 mutant DNA polymerase, 9degreesN mutant
atgattctcgataccgactacatcaccgagaacgggaagcccgtgataagggtcttcaagaaggagaacggcgagtttaaaatcgagtacgacagaaccttcgagccctacttctacgcccttctgaaggacgattctgcgatagaggacgtcaagaaggtaaccgcaaagaggcacggaacggttgtcaaggtgaagcgcgccgagaaggtgcagaagaagttcctcggcaggccgatagaggtctggaagctctacttcaaccatcctcaggacgtcccggcgattcgagacaggatacgcgcccaccccgctgtcgttgacatctacgagtacgacatacccttcgccaagcgctacctcatcgacaagggcctgattccgatggagggcgacgaggagcttacgatgctcgccttcgcgatcgcaaccctctatcacgagggcgaggagttcggaaccgggccgattctcatgataagctacgccgacgggagcgaggcgagggtgataacctggaagaagattgaccttccgtacgttgacgtcgtctcgaccgagaaggagatgattaagcgcttcctccgcgtcgtcagggagaaggaccccgacgtgctcatcacctacaacggcgacaacttcgacttcgcctacctgaagaagcgctgtgaggaactcggaataaagttcacactcggcagggacgggagcgagccgaagatacagcgaatgggcgaccgctttgccgttgaggtgaagggcaggattcacttcgacctctaccccgtcataaggcgcacgataaacctcccgacctacacccttgaggccgtttacgaggccgtctttggaaagcccaaggagaaggtttacgcagaggagatagcgcaggcctgggagagcggggagggccttgaaagggttgcaagatactcgatggaggacgctaaggtgacctacgagctgggaagggagttcttcccgatggaggcccagctttcgaggcttataggccagagcctctgggacgtctcgcgctcgagcaccggaaatttggtggaggcattcctcctgcggaaggcctacaagaggaacgagctcgccccaaacaagcccgacgagagggagctcgcgagacggcgcgggggctacgctggcgggtacgttaaggaaccagagcggggattgtgggacaacattgtgtatttagacttccgctcgtggtatccttcaatcatcataacccacaacgtctcgccggataccctcaaccgcgagggctgtaaagagtacgacgtcgcccctgaggttggacacaagttctgcaaggacttccccggcttcataccaagcctcctgggagatttgctcgaggaggcgagcaagatagagcggaagatgaaggcaacggttgacccgctggagaagaaactcctcgtgtacaggcagtggcttataaaaatcctcgcctacagcttctacggctactacggctacgccaaggcccggtggtactgcaaggagtgcgccgagagcgttacggcctggggaagggagtatatagaaatggttatccgggaactcgaagaaaaattcggttttaaagttctctatgccgatacagacggtctccatgctaccattcccggagcagacgctgaaacagtcaagaaaaaagcaaaggagttcttaaaatacattaatccaaaactgcccggcctgctcgaacttgagtacgagggcttctacgtgaggggcttcttcgtcacgaagaagaagtacgctgtgatagacgaggagggcaagataaccacgaggggtcttgagattgtgaggcgcgactggagcgagatagcgaaggagacccaggccagggtcttagaggcgatactcaagcacggtgacgtcgaggaggccgttaggatagtcaaggaagtgacggaaaagctgagcaagtatgaggtcccgcccgagaagctggtaatccacgagcagataacgcgcgatttgagggattacaaagccaccggcccgcacgttgccgttgcgaagaggctcgcggcgcgtggagtgaaaatccggcccggcacggtgataagctacatcgtcctaaagggctctggaaggataggcgacagggcgattccagctgatgagttcgacccgacgaagcaccgctacgatgcggaatactacatcgagaaccaggttctcccggcggtggagaggattctaaaagccttcggctatcggaaggaggatttgcgctaccagaagacgaagcaggtcggctcgggcgcgtggctgaaggtgaaggggaagaagggtaccgaagcttacgtagaacaaaaactcatctcagaagaggatctgaatagcgccgtcgaccatcatcatcatcatcattga

SEQ ID NO: 642 - protein, 802 aa, Artificial Sequence
  Description of Artificial Sequence:Thermococcus species 9degreesN-7 mutant DNA polymerase, 9degreesN mutant
MILDTDYITENGKPVIRVFKKENGEFKIEYDRTFEPYFYALLKDDSAIEDVKKVTAKRHGTVVKVKRAEKVQKKFLGRPIEVWKLYFNHPQDVPAIRDRIRAHPAVVDIYEYDIPFAKRYLIDKGLIPMEGDEELTMLAFAIATLYHEGEEFGTGPILMISYADGSEARVITWKKIDLPYVDVVSTEKEMIKRFLRVVREKDPDVLITYNGDNFDFAYLKKRCEELGIKFTLGRDGSEPKIQRMGDRFAVEVKGRIHFDLYPVIRRTINLPTYTLEAVYEAVFGKPKEKVYAEEIAQAWESGEGLERVARYSMEDAKVTYELGREFFPMEAQLSRLIGQSLWDVSRSSTGNLVEAFLLRKAYKRNELAPNKPDERELARRRGGYAGGYVKEPERGLWDNIVYLDFRSWYPSIIITHNVSPDTLNREGCKEYDVAPEVGHKFCKDFPGFIPSLLGDLLEEASKIERKMKATVDPLEKKLLVYRQWLIKILAYSFYGYYGYAKARWYCKECAESVTAWGREYIEMVIRELEEKFGFKVLYADTDGLHATIPGADAETVKKKAKEFLKYINPKLPGLLELEYEGFYVRGFFVTKKKYAVIDEEGKITTRGLEIVRRDWSEIAKETQARVLEAILKHGDVEEAVRIVKEVTEKLSKYEVPPEKLVIHEQITRDLRDYKATGPHVAVAKRLAARGVKIRPGTVISYIVLKGSGRIGDRAIPADEFDPTKHRYDAEYYIENQVLPAVERILKAFGYRKEDLRYQKTKQVGSGAWLKVKGKKGTEAYVEQKLISEEDLNSAVDHHHHHH

SEQ ID NO: 643 - DNA, 2409 bp, Artificial Sequence
  Description of Artificial Sequence:Thermococcus species 9degreesN-7 mutant DNA polymerase, 9degreesN mutant
atgattctcgataccgactacatcaccgagaacgggaagcccgtgataagggtcttcaagaaggagaacggcgagtttaaaatcgagtacgacagaaccttcgagccctacttctacgcccttctgaaggacgattctgcgatagaggacgtcaagaaggtaaccgcaaagaggcacggaacggttgtcaaggtgaagcgcgccgagaaggtgcagaagaagttcctcggcaggccgatagaggtctggaagctctacttcaaccatcctcaggacgtcccggcgattcgagacaggatacgcgcccaccccgctgtcgttgacatctacgagtacgacatacccttcgccaagcgctacctcatcgacaagggcctgattccgatggagggcgacgaggagcttacgatgctcgccttcgcgatcgcaaccctctatcacgagggcgaggagttcggaaccgggccgattctcatgataagctacgccgacgggagcgaggcgagggtgataacctggaagaagattgaccttccgtacgttgacgtcgtctcgaccgagaaggagatgattaagcgcttcctccgcgtcgtcagggagaaggaccccgacgtgctcatcacctacaacggcgacaacttcgacttcgcctacctgaagaagcgctgtgaggaactcggaataaagttcacactcggcagggacgggagcgagccgaagatacagcgaatgggcgaccgctttgccgttgaggtgaagggcaggattcacttcgacctctaccccgtcataaggcgcacgataaacctcccgacctacacccttgaggccgtttacgaggccgtctttggaaagcccaaggagaaggtttacgcagaggagatagcgcaggcctgggagagcggggagggccttgaaagggttgcaagatactcgatggaggacgctaaggtgacctacgagctgggaagggagttcttcccgatggaggcccagctttcgaggcttataggccagagcctctgggacgtctcgcgctcgagcaccggaaatttggtggaggcattcctcctgcggaaggcctacaagaggaacgagctcgccccaaacaagcccgacgagagggagctcgcgagacggcgcgggggctacgctggcgggtacgttaaggaaccagagcggggattgtgggacaacattgtgtatttagacttccgctcgtggtatccttcaatcatcataacccacaacgtctcgccggataccctcaaccgcgagggctgtaaagagtacgacgtcgcccctgaggttggacacaagttctgcaaggacttccccggcttcataccaagcctcctgggagatttgctcgaggaggcgagcaagatagagcggaagatgaaggcaacggttgacccgctggagaagaaactcctcgtgtacaggcagtggcttataaaaatcctcgcccacagcttctacggctactacggctacgccaaggcccggtggtactgcaaggagtgcgccgagagcgttacggcctggggaagggagtatatagaaatggttatccgggaactcgaagaaaaattcggttttaaagttctctatgccgatacagacggtctccatgctaccattcccggagcagacgctgaaacagtcaagaaaaaagcaaaggagttcttaaaatacattaatccaaaactgcccggcctgctcgaacttgagtacgagggcttctacgtgaggggcttcttcgtcacgaagaagaagtacgctgtgatagacgaggagggcaagataaccacgaggggtcttgagattgtgaggcgcgactggagcgagatagcgaaggagacccaggccagggtcttagaggcgatactcaagcacggtgacgtcgaggaggccgttaggatagtcaaggaagtgacggaaaagctgagcaagtatgaggtcccgcccgagaagctggtaatccacgagcagataacgcgcgatttgagggattacaaagccaccggcccgcacgttgccgttgcgaagaggctcgcggcgcgtggagtgaaaatccggcccggcacggtgataagctacatcgtcctaaagggctctggaaggataggcgacagggcgattccagctgatgagttcgacccgacgaagcaccgctacgatgcggaatactacatcgagaaccaggttctcccggcggtggagaggattctaaaagccttcggctatcggaaggaggatttgcgctaccagaagacgaagcaggtcggctcgggcgcgtggctgaaggtgaaggggaagaagggtaccgaagcttacgtagaacaaaaactcatctcagaagaggatctgaatagcgccgtcgaccatcatcatcatcatcattga

SEQ ID NO: 644 - protein, 802 aa, Artificial Sequence
  Description of Artificial Sequence:Thermococcus species 9degreesN-7 mutant DNA polymerase, 9degreesN mutant
MILDTDYITENGKPVIRVFKKENGEFKIEYDRTFEPYFYALLKDDSAIEDVKKVTAKRHGTVVKVKRAEKVQKKFLGRPIEVWKLYFNHPQDVPAIRDRIRAHPAVVDIYEYDIPFAKRYLIDKGLIPMEGDEELTMLAFAIATLYHEGEEFGTGPILMISYADGSEARVITWKKIDLPYVDVVSTEKEMIKRFLRVVREKDPDVLITYNGDNFDFAYLKKRCEELGIKFTLGRDGSEPKIQRMGDRFAVEVKGRIHFDLYPVIRRTINLPTYTLEAVYEAVFGKPKEKVYAEEIAQAWESGEGLERVARYSMEDAKVTYELGREFFPMEAQLSRLIGQSLWDVSRSSTGNLVEAFLLRKAYKRNELAPNKPDERELARRRGGYAGGYVKEPERGLWDNIVYLDFRSWYPSIIITHNVSPDTLNREGCKEYDVAPEVGHKFCKDFPGFIPSLLGDLLEEASKIERKMKATVDPLEKKLLVYRQWLIKILAHSFYGYYGYAKARWYCKECAESVTAWGREYIEMVIRELEEKFGFKVLYADTDGLHATIPGADAETVKKKAKEFLKYINPKLPGLLELEYEGFYVRGFFVTKKKYAVIDEEGKITTRGLEIVRRDWSEIAKETQARVLEAILKHGDVEEAVRIVKEVTEKLSKYEVPPEKLVIHEQITRDLRDYKATGPHVAVAKRLAARGVKIRPGTVISYIVLKGSGRIGDRAIPADEFDPTKHRYDAEYYIENQVLPAVERILKAFGYRKEDLRYQKTKQVGSGAWLKVKGKKGTEAYVEQKLISEEDLNSAVDHHHHHH

SEQ ID NO: 645 - DNA, 2409 bp, Artificial Sequence
  Description of Artificial Sequence:Thermococcus species 9degreesN-7 mutant DNA polymerase, 9degreesN mutant
atgattctcgataccgactacatcaccgagaacgggaagcccgtgataagggtcttcaagaaggagaacggcgagtttaaaatcgagtacgacagaaccttcgagccctacttctacgcccttctgaaggacgattctgcgatagaggacgtcaagaaggtaaccgcaaagaggcacggaacggttgtcaaggtgaagcgcgccgagaaggtgcagaagaagttcctcggcaggccgatagaggtctggaagctctacttcaaccatcctcaggacgtcccggcgattcgagacaggatacgcgcccaccccgctgtcgttgacatctacgagtacgacatacccttcgccaagcgctacctcatcgacaagggcctgattccgatggagggcgacgaggagcttacgatgctcgccttcgcgatcgcaaccctctatcacgagggcgaggagttcggaaccgggccgattctcatgataagctacgccgacgggagcgaggcgagggtgataacctggaagaagattgaccttccgtacgttgacgtcgtctcgaccgagaaggagatgattaagcgcttcctccgcgtcgtcagggagaaggaccccgacgtgctcatcacctacaacggcgacaacttcgacttcgcctacctgaagaagcgctgtgaggaactcggaataaagttcacactcggcagggacgggagcgagccgaagatacagcgaatgggcgaccgctttgccgttgaggtgaagggcaggattcacttcgacctctaccccgtcataaggcgcacgataaacctcccgacctacacccttgaggccgtttacgaggccgtctttggaaagcccaaggagaaggtttacgcagaggagatagcgcaggcctgggagagcggggagggccttgaaagggttgcaagatactcgatggaggacgctaaggtgacctacgagctgggaagggagttcttcccgatggaggcccagctttcgaggcttataggccagagcctctgggacgtctcgcgctcgagcaccggaaatttggtggaggcattcctcctgcggaaggcctacaagaggaacgagctcgccccaaacaagcccgacgagagggagctcgcgagacggcgcgggggctacgctggcgggtacgttaaggaaccagagcggggattgtgggacaacattgtgtatttagacttccgctcgtggagcccttcaatcatcataacccacaacgtctcgccggataccctcaaccgcgagggctgtaaagagtacgacgtcgcccctgaggttggacacaagttctgcaaggacttccccggcttcataccaagcctcctgggagatttgctcgaggaggcgagcaagatagagcggaagatgaaggcaacggttgacccgctggagaagaaactcctcgtgtacaggcagtggcttataaaaatcctcgccaacagcttctacggctactacggctacgccaaggcccggtggtactgcaaggagtgcgccgagagcgttacggcctggggaagggagtatatagaaatggttatccgggaactcgaagaaaaattcggttttaaagttctctatgccgatacagacggtctccatgctaccattcccggagcagacgctgaaacagtcaagaaaaaagcaaaggagttcttaaaatacattaatccaaaactgcccggcctgctcgaacttgagtacgagggcttctacgtgaggggcttcttcgtcacgaagaagaagtacgctgtgatagacgaggagggcaagataaccacgaggggtcttgagattgtgaggcgcgactggagcgagatagcgaaggagacccaggccagggtcttagaggcgatactcaagcacggtgacgtcgaggaggccgttaggatagtcaaggaagtgacggaaaagctgagcaagtatgaggtcccgcccgagaagctggtaatccacgagcagataacgcgcgatttgagggattacaaagccaccggcccgcacgttgccgttgcgaagaggctcgcggcgcgtggagtgaaaatccggcccggcacggtgataagctacatcgtcctaaagggctctggaaggataggcgacagggcgattccagctgatgagttcgacccgacgaagcaccgctacgatgcggaatactacatcgagaaccaggttctcccggcggtggagaggattctaaaagccttcggctatcggaaggaggatttgcgctaccagaagacgaagcaggtcggctcgggcgcgtggctgaaggtgaaggggaagaagggtaccgaagcttacgtagaacaaaaactcatctcagaagaggatctgaatagcgccgtcgaccatcatcatcatcatcattga

SEQ ID NO: 646 - protein, 802 aa, Artificial Sequence
  Description of Artificial Sequence:Thermococcus species 9degreesN-7 mutant DNA polymerase, 9degreesN mutant
MILDTDYITENGKPVIRVFKKENGEFKIEYDRTFEPYFYALLKDDSAIEDVKKVTAKRHGTVVKVKRAEKVQKKFLGRPIEVWKLYFNHPQDVPAIRDRIRAHPAVVDIYEYDIPFAKRYLIDKGLIPMEGDEELTMLAFAIATLYHEGEEFGTGPILMISYADGSEARVITWKKIDLPYVDVVSTEKEMIKRFLRVVREKDPDVLITYNGDNFDFAYLKKRCEELGIKFTLGRDGSEPKIQRMGDRFAVEVKGRIHFDLYPVIRRTINLPTYTLEAVYEAVFGKPKEKVYAEEIAQAWESGEGLERVARYSMEDAKVTYELGREFFPMEAQLSRLIGQSLWDVSRSSTGNLVEAFLLRKAYKRNELAPNKPDERELARRRGGYAGGYVKEPERGLWDNIVYLDFRSWSPSIIITHNVSPDTLNREGCKEYDVAPEVGHKFCKDFPGFIPSLLGDLLEEASKIERKMKATVDPLEKKLLVYRQWLIKILANSFYGYYGYAKARWYCKECAESVTAWGREYIEMVIRELEEKFGFKVLYADTDGLHATIPGADAETVKKKAKEFLKYINPKLPGLLELEYEGFYVRGFFVTKKKYAVIDEEGKITTRGLEIVRRDWSEIAKETQARVLEAILKHGDVEEAVRIVKEVTEKLSKYEVPPEKLVIHEQITRDLRDYKATGPHVAVAKRLAARGVKIRPGTVISYIVLKGSGRIGDRAIPADEFDPTKHRYDAEYYIENQVLPAVERILKAFGYRKEDLRYQKTKQVGSGAWLKVKGKKGTEAYVEQKLISEEDLNSAVDHHHHHH

SEQ ID NO: 647 - DNA, 2409 bp, Artificial Sequence
  Description of Artificial Sequence:Thermococcus species 9degreesN-7 mutant DNA polymerase, 9degreesN mutant
atgattctcgataccgactacatcaccgagaacgggaagcccgtgataagggtcttcaagaaggagaacggcgagtttaaaatcgagtacgacagaaccttcgagccctacttctacgcccttctgaaggacgattctgcgatagaggacgtcaagaaggtaaccgcaaagaggcacggaacggttgtcaaggtgaagcgcgccgagaaggtgcagaagaagttcctcggcaggccgatagaggtctggaagctctacttcaaccatcctcaggacgtcccggcgattcgagacaggatacgcgcccaccccgctgtcgttgacatctacgagtacgacatacccttcgccaagcgctacctcatcgacaagggcctgattccgatggagggcgacgaggagcttacgatgctcgccttcgcgatcgcaaccctctatcacgagggcgaggagttcggaaccgggccgattctcatgataagctacgccgacgggagcgaggcgagggtgataacctggaagaagattgaccttccgtacgttgacgtcgtctcgaccgagaaggagatgattaagcgcttcctccgcgtcgtcagggagaaggaccccgacgtgctcatcacctacaacggcgacaacttcgacttcgcctacctgaagaagcgctgtgaggaactcggaataaagttcacactcggcagggacgggagcgagccgaagatacagcgaatgggcgaccgctttgccgttgaggtgaagggcaggattcacttcgacctctaccccgtcataaggcgcacgataaacctcccgacctacacccttgaggccgtttacgaggccgtctttggaaagcccaaggagaaggtttacgcagaggagatagcgcaggcctgggagagcggggagggccttgaaagggttgcaagatactcgatggaggacgctaaggtgacctacgagctgggaagggagttcttcccgatggaggcccagctttcgaggcttataggccagagcctctgggacgtctcgcgctcgagcaccggaaatttggtggaggcattcctcctgcggaaggcctacaagaggaacgagctcgccccaaacaagcccgacgagagggagctcgcgagacggcgcgggggctacgctggcgggtacgttaaggaaccagagcggggattgtgggacaacattgtgtatttagacttccgctcgtgggctccttcaatcatcataacccacaacgtctcgccggataccctcaaccgcgagggctgtaaagagtacgacgtcgcccctgaggttggacacaagttctgcaaggacttccccggcttcataccaagcctcctgggagatttgctcgaggaggcgagcaagatagagcggaagatgaaggcaacggttgacccgctggagaagaaactcctcgtgtacaggcagtggcttataaaaatcctcgccaacagcttctacggctactacggctacgccaaggcccggtggtactgcaaggagtgcgccgagagcgttacggcctggggaagggagtatatagaaatggttatccgggaactcgaagaaaaattcggttttaaagttctctatgccgatacagacggtctccatgctaccattcccggagcagacgctgaaacagtcaagaaaaaagcaaaggagttcttaaaatacattaatccaaaactgcccggcctgctcgaacttgagtacgagggcttctacgtgaggggcttcttcgtcacgaagaagaagtacgctgtgatagacgaggagggcaagataaccacgaggggtcttgagattgtgaggcgcgactggagcgagatagcgaaggagacccaggccagggtcttagaggcgatactcaagcacggtgacgtcgaggaggccgttaggatagtcaaggaagtgacggaaaagctgagcaagtatgaggtcccgcccgagaagctggtaatccacgagcagataacgcgcgatttgagggattacaaagccaccggcccgcacgttgccgttgcgaagaggctcgcggcgcgtggagtgaaaatccggcccggcacggtgataagctacatcgtcctaaagggctctggaaggataggcgacagggcgattccagctgatgagttcgacccgacgaagcaccgctacgatgcggaatactacatcgagaaccaggttctcccggcggtggagaggattctaaaagccttcggctatcggaaggaggatttgcgctaccagaagacgaagcaggtcggctcgggcgcgtggctgaaggtgaaggggaagaagggtaccgaagcttacgtagaacaaaaactcatctcagaagaggatctgaatagcgccgtcgaccatcatcatcatcatcattga

SEQ ID NO: 648 - protein, 802 aa, Artificial Sequence
  Description of Artificial Sequence:Thermococcus species 9degreesN-7 mutant DNA polymerase, 9degreesN mutant
MILDTDYITENGKPVIRVFKKENGEFKIEYDRTFEPYFYALLKDDSAIEDVKKVTAKRHGTVVKVKRAEKVQKKFLGRPIEVWKLYFNHPQDVPAIRDRIRAHPAVVDIYEYDIPFAKRYLIDKGLIPMEGDEELTMLAFAIATLYHEGEEFGTGPILMISYADGSEARVITWKKIDLPYVDVVSTEKEMIKRFLRVVREKDPDVLITYNGDNFDFAYLKKRCEELGIKFTLGRDGSEPKIQRMGDRFAVEVKGRIHFDLYPVIRRTINLPTYTLEAVYEAVFGKPKEKVYAEEIAQAWESGEGLERVARYSMEDAKVTYELGREFFPMEAQLSRLIGQSLWDVSRSSTGNLVEAFLLRKAYKRNELAPNKPDERELARRRGGYAGGYVKEPERGLWDNIVYLDFRSWAPSIIITHNVSPDTLNREGCKEYDVAPEVGHKFCKDFPGFIPSLLGDLLEEASKIERKMKATVDPLEKKLLVYRQWLIKILANSFYGYYGYAKARWYCKECAESVTAWGREYIEMVIRELEEKFGFKVLYADTDGLHATIPGADAETVKKKAKEFLKYINPKLPGLLELEYEGFYVRGFFVTKKKYAVIDEEGKITTRGLEIVRRDWSEIAKETQARVLEAILKHGDVEEAVRIVKEVTEKLSKYEVPPEKLVIHEQITRDLRDYKATGPHVAVAKRLAARGVKIRPGTVISYIVLKGSGRIGDRAIPADEFDPTKHRYDAEYYIENQVLPAVERILKAFGYRKEDLRYQKTKQVGSGAWLKVKGKKGTEAYVEQKLISEEDLNSAVDHHHHHH

SEQ ID NO: 649 - DNA, 2409 bp, Artificial Sequence
  Description of Artificial Sequence:Thermococcus species 9degreesN-7 mutant DNA polymerase, 9degreesN mutant
atgattctcgataccgactacatcaccgagaacgggaagcccgtgataagggtcttcaagaaggagaacggcgagtttaaaatcgagtacgacagaaccttcgagccctacttctacgcccttctgaaggacgattctgcgatagaggacgtcaagaaggtaaccgcaaagaggcacggaacggttgtcaaggtgaagcgcgccgagaaggtgcagaagaagttcctcggcaggccgatagaggtctggaagctctacttcaaccatcctcaggacgtcccggcgattcgagacaggatacgcgcccaccccgctgtcgttgacatctacgagtacgacatacccttcgccaagcgctacctcatcgacaagggcctgattccgatggagggcgacgaggagcttacgatgctcgccttcgcgatcgcaaccctctatcacgagggcgaggagttcggaaccgggccgattctcatgataagctacgccgacgggagcgaggcgagggtgataacctggaagaagattgaccttccgtacgttgacgtcgtctcgaccgagaaggagatgattaagcgcttcctccgcgtcgtcagggagaaggaccccgacgtgctcatcacctacaacggcgacaacttcgacttcgcctacctgaagaagcgctgtgaggaactcggaataaagttcacactcggcagggacgggagcgagccgaagatacagcgaatgggcgaccgctttgccgttgaggtgaagggcaggattcacttcgacctctaccccgtcataaggcgcacgataaacctcccgacctacacccttgaggccgtttacgaggccgtctttggaaagcccaaggagaaggtttacgcagaggagatagcgcaggcctgggagagcggggagggccttgaaagggttgcaagatactcgatggaggacgctaaggtgacctacgagctgggaagggagttcttcccgatggaggcccagctttcgaggcttataggccagagcctctgggacgtctcgcgctcgagcaccggaaatttggtggaggcattcctcctgcggaaggcctacaagaggaacgagctcgccccaaacaagcccgacgagagggagctcgcgagacggcgcgggggctacgctggcgggtacgttaaggaaccagagcggggattgtgggacaacattgtgtatttagacttccgctcgtggaagccttcaatcatcataacccacaacgtctcgccggataccctcaaccgcgagggctgtaaagagtacgacgtcgcccctgaggttggacacaagttctgcaaggacttccccggcttcataccaagcctcctgggagatttgctcgaggaggcgagcaagatagagcggaagatgaaggcaacggttgacccgctggagaagaaactcctcgtgtacaggcagtggcttataaaaatcctcgccaacagcttctacggctactacggctacgccaaggcccggtggtactgcaaggagtgcgccgagagcgttacggcctggggaagggagtatatagaaatggttatccgggaactcgaagaaaaattcggttttaaagttctctatgccgatacagacggtctccatgctaccattcccggagcagacgctgaaacagtcaagaaaaaagcaaaggagttcttaaaatacattaatccaaaactgcccggcctgctcgaacttgagtacgagggcttctacgtgaggggcttcttcgtcacgaagaagaagtacgctgtgatagacgaggagggcaagataaccacgaggggtcttgagattgtgaggcgcgactggagcgagatagcgaaggagacccaggccagggtcttagaggcgatactcaagcacggtgacgtcgaggaggccgttaggatagtcaaggaagtgacggaaaagctgagcaagtatgaggtcccgcccgagaagctggtaatccacgagcagataacgcgcgatttgagggattacaaagccaccggcccgcacgttgccgttgcgaagaggctcgcggcgcgtggagtgaaaatccggcccggcacggtgataagctacatcgtcctaaagggctctggaaggataggcgacagggcgattccagctgatgagttcgacccgacgaagcaccgctacgatgcggaatactacatcgagaaccaggttctcccggcggtggagaggattctaaaagccttcggctatcggaaggaggatttgcgctaccagaagacgaagcaggtcggctcgggcgcgtggctgaaggtgaaggggaagaagggtaccgaagcttacgtagaacaaaaactcatctcagaagaggatctgaatagcgccgtcgaccatcatcatcatcatcattga

SEQ ID NO: 650 - protein, 802 aa, Artificial Sequence
  Description of Artificial Sequence:Thermococcus species 9degreesN-7 mutant DNA polymerase, 9degreesN mutant
MILDTDYITENGKPVIRVFKKENGEFKIEYDRTFEPYFYALLKDDSAIEDVKKVTAKRHGTVVKVKRAEKVQKKFLGRPIEVWKLYFNHPQDVPAIRDRIRAHPAVVDIYEYDIPFAKRYLIDKGLIPMEGDEELTMLAFAIATLYHEGEEFGTGPILMISYADGSEARVITWKKIDLPYVDVVSTEKEMIKRFLRVVREKDPDVLITYNGDNFDFAYLKKRCEELGIKFTLGRDGSEPKIQRMGDRFAVEVKGRIHFDLYPVIRRTINLPTYTLEAVYEAVFGKPKEKVYAEEIAQAWESGEGLERVARYSMEDAKVTYELGREFFPMEAQLSRLIGQSLWDVSRSSTGNLVEAFLLRKAYKRNELAPNKPDERELARRRGGYAGGYVKEPERGLWDNIVYLDFRSWKPSIIITHNVSPDTLNREGCKEYDVAPEVGHKFCKDFPGFIPSLLGDLLEEASKIERKMKATVDPLEKKLLVYRQWLIKILANSFYGYYGYAKARWYCKECAESVTAWGREYIEMVIRELEEKFGFKVLYADTDGLHATIPGADAETVKKKAKEFLKYINPKLPGLLELEYEGFYVRGFFVTKKKYAVIDEEGKITTRGLEIVRRDWSEIAKETQARVLEAILKHGDVEEAVRIVKEVTEKLSKYEVPPEKLVIHEQITRDLRDYKATGPHVAVAKRLAARGVKIRPGTVISYIVLKGSGRIGDRAIPADEFDPTKHRYDAEYYIENQVLPAVERILKAFGYRKEDLRYQKTKQVGSGAWLKVKGKKGTEAYVEQKLISEEDLNSAVDHHHHHH

SEQ ID NO: 651 - DNA, 2409 bp, Artificial Sequence
  Description of Artificial Sequence:Thermococcus species 9degreesN-7 mutant DNA polymerase, 9degreesN mutant
atgattctcgataccgactacatcaccgagaacgggaagcccgtgataagggtcttcaagaaggagaacggcgagtttaaaatcgagtacgacagaaccttcgagccctacttctacgcccttctgaaggacgattctgcgatagaggacgtcaagaaggtaaccgcaaagaggcacggaacggttgtcaaggtgaagcgcgccgagaaggtgcagaagaagttcctcggcaggccgatagaggtctggaagctctacttcaaccatcctcaggacgtcccggcgattcgagacaggatacgcgcccaccccgctgtcgttgacatctacgagtacgacatacccttcgccaagcgctacctcatcgacaagggcctgattccgatggagggcgacgaggagcttacgatgctcgccttcgcgatcgcaaccctctatcacgagggcgaggagttcggaaccgggccgattctcatgataagctacgccgacgggagcgaggcgagggtgataacctggaagaagattgaccttccgtacgttgacgtcgtctcgaccgagaaggagatgattaagcgcttcctccgcgtcgtcagggagaaggaccccgacgtgctcatcacctacaacggcgacaacttcgacttcgcctacctgaagaagcgctgtgaggaactcggaataaagttcacactcggcagggacgggagcgagccgaagatacagcgaatgggcgaccgctttgccgttgaggtgaagggcaggattcacttcgacctctaccccgtcataaggcgcacgataaacctcccgacctacacccttgaggccgtttacgaggccgtctttggaaagcccaaggagaaggtttacgcagaggagatagcgcaggcctgggagagcggggagggccttgaaagggttgcaagatactcgatggaggacgctaaggtgacctacgagctgggaagggagttcttcccgatggaggcccagctttcgaggcttataggccagagcctctgggacgtctcgcgctcgagcaccggaaatttggtggaggcattcctcctgcggaaggcctacaagaggaacgagctcgccccaaacaagcccgacgagagggagctcgcgagacggcgcgggggctacgctggcgggtacgttaaggaaccagagcggggattgtgggacaacattgtgtatttagacttccgctcgtggcaaccttcaatcatcataacccacaacgtctcgccggataccctcaaccgcgagggctgtaaagagtacgacgtcgcccctgaggttggacacaagttctgcaaggacttccccggcttcataccaagcctcctgggagatttgctcgaggaggcgagcaagatagagcggaagatgaaggcaacggttgacccgctggagaagaaactcctcgtgtacaggcagtggcttataaaaatcctcgccaacagcttctacggctactacggctacgccaaggcccggtggtactgcaaggagtgcgccgagagcgttacggcctggggaagggagtatatagaaatggttatccgggaactcgaagaaaaattcggttttaaagttctctatgccgatacagacggtctccatgctaccattcccggagcagacgctgaaacagtcaagaaaaaagcaaaggagttcttaaaatacattaatccaaaactgcccggcctgctcgaacttgagtacgagggcttctacgtgaggggcttcttcgtcacgaagaagaagtacgctgtgatagacgaggagggcaagataaccacgaggggtcttgagattgtgaggcgcgactggagcgagatagcgaaggagacccaggccagggtcttagaggcgatactcaagcacggtgacgtcgaggaggccgttaggatagtcaaggaagtgacggaaaagctgagcaagtatgaggtcccgcccgagaagctggtaatccacgagcagataacgcgcgatttgagggattacaaagccaccggcccgcacgttgccgttgcgaagaggctcgcggcgcgtggagtgaaaatccggcccggcacggtgataagctacatcgtcctaaagggctctggaaggataggcgacagggcgattccagctgatgagttcgacccgacgaagcaccgctacgatgcggaatactacatcgagaaccaggttctcccggcggtggagaggattctaaaagccttcggctatcggaaggaggatttgcgctaccagaagacgaagcaggtcggctcgggcgcgtggctgaaggtgaaggggaagaagggtaccgaagcttacgtagaacaaaaactcatctcagaagaggatctgaatagcgccgtcgaccatcatcatcatcatcattga

SEQ ID NO: 652 - protein, 802 aa, Artificial Sequence
  Description of Artificial Sequence:Thermococcus species 9degreesN-7 mutant DNA polymerase, 9degreesN mutant
MILDTDYITENGKPVIRVFKKENGEFKIEYDRTFEPYFYALLKDDSAIEDVKKVTAKRHGTVVKVKRAEKVQKKFLGRPIEVWKLYFNHPQDVPAIRDRIRAHPAVVDIYEYDIPFAKRYLIDKGLIPMEGDEELTMLAFAIATLYHEGEEFGTGPILMISYADGSEARVITWKKIDLPYVDVVSTEKEMIKRFLRVVREKDPDVLITYNGDNFDFAYLKKRCEELGIKFTLGRDGSEPKIQRMGDRFAVEVKGRIHFDLYPVIRRTINLPTYTLEAVYEAVFGKPKEKVYAEEIAQAWESGEGLERVARYSMEDAKVTYELGREFFPMEAQLSRLIGQSLWDVSRSSTGNLVEAFLLRKAYKRNELAPNKPDERELARRRGGYAGGYVKEPERGLWDNIVYLDFRSWQPSIIITHNVSPDTLNREGCKEYDVAPEVGHKFCKDFPGFIPSLLGDLLEEASKIERKMKATVDPLEKKLLVYRQWLIKILANSFYGYYGYAKARWYCKECAESVTAWGREYIEMVIRELEEKFGFKVLYADTDGLHATIPGADAETVKKKAKEFLKYINPKLPGLLELEYEGFYVRGFFVTKKKYAVIDEEGKITTRGLEIVRRDWSEIAKETQARVLEAILKHGDVEEAVRIVKEVTEKLSKYEVPPEKLVIHEQITRDLRDYKATGPHVAVAKRLAARGVKIRPGTVISYIVLKGSGRIGDRAIPADEFDPTKHRYDAEYYIENQVLPAVERILKAFGYRKEDLRYQKTKQVGSGAWLKVKGKKGTEAYVEQKLISEEDLNSAVDHHHHHH

SEQ ID NO: 653 - DNA, 2409 bp, Artificial Sequence
  Description of Artificial Sequence:Thermococcus species 9degreesN-7 mutant DNA polymerase, 9degreesN mutant
atgattctcgataccgactacatcaccgagaacgggaagcccgtgataagggtcttcaagaaggagaacggcgagtttaaaatcgagtacgacagaaccttcgagccctacttctacgcccttctgaaggacgattctgcgatagaggacgtcaagaaggtaaccgcaaagaggcacggaacggttgtcaaggtgaagcgcgccgagaaggtgcagaagaagttcctcggcaggccgatagaggtctggaagctctacttcaaccatcctcaggacgtcccggcgattcgagacaggatacgcgcccaccccgctgtcgttgacatctacgagtacgacatacccttcgccaagcgctacctcatcgacaagggcctgattccgatggagggcgacgaggagcttacgatgctcgccttcgcgatcgcaaccctctatcacgagggcgaggagttcggaaccgggccgattctcatgataagctacgccgacgggagcgaggcgagggtgataacctggaagaagattgaccttccgtacgttgacgtcgtctcgaccgagaaggagatgattaagcgcttcctccgcgtcgtcagggagaaggaccccgacgtgctcatcacctacaacggcgacaacttcgacttcgcctacctgaagaagcgctgtgaggaactcggaataaagttcacactcggcagggacgggagcgagccgaagatacagcgaatgggcgaccgctttgccgttgaggtgaagggcaggattcacttcgacctctaccccgtcataaggcgcacgataaacctcccgacctacacccttgaggccgtttacgaggccgtctttggaaagcccaaggagaaggtttacgcagaggagatagcgcaggcctgggagagcggggagggccttgaaagggttgcaagatactcgatggaggacgctaaggtgacctacgagctgggaagggagttcttcccgatggaggcccagctttcgaggcttataggccagagcctctgggacgtctcgcgctcgagcaccggaaatttggtggaggcattcctcctgcggaaggcctacaagaggaacgagctcgccccaaacaagcccgacgagagggagctcgcgagacggcgcgggggctacgctggcgggtacgttaaggaaccagagcggggattgtgggacaacattgtgtatttagacttccgctcgtggtggccttcaatcatcataacccacaacgtctcgccggataccctcaaccgcgagggctgtaaagagtacgacgtcgcccctgaggttggacacaagttctgcaaggacttccccggcttcataccaagcctcctgggagatttgctcgaggaggcgagcaagatagagcggaagatgaaggcaacggttgacccgctggagaagaaactcctcgtgtacaggcagtggcttataaaaatcctcgccaacagcttctacggctactacggctacgccaaggcccggtggtactgcaaggagtgcgccgagagcgttacggcctggggaagggagtatatagaaatggttatccgggaactcgaagaaaaattcggttttaaagttctctatgccgatacagacggtctccatgctaccattcccggagcagacgctgaaacagtcaagaaaaaagcaaaggagttcttaaaatacattaatccaaaactgcccggcctgctcgaacttgagtacgagggcttctacgtgaggggcttcttcgtcacgaagaagaagtacgctgtgatagacgaggagggcaagataaccacgaggggtcttgagattgtgaggcgcgactggagcgagatagcgaaggagacccaggccagggtcttagaggcgatactcaagcacggtgacgtcgaggaggccgttaggatagtcaaggaagtgacggaaaagctgagcaagtatgaggtcccgcccgagaagctggtaatccacgagcagataacgcgcgatttgagggattacaaagccaccggcccgcacgttgccgttgcgaagaggctcgcggcgcgtggagtgaaaatccggcccggcacggtgataagctacatcgtcctaaagggctctggaaggataggcgacagggcgattccagctgatgagttcgacccgacgaagcaccgctacgatgcggaatactacatcgagaaccaggttctcccggcggtggagaggattctaaaagccttcggctatcggaaggaggatttgcgctaccagaagacgaagcaggtcggctcgggcgcgtggctgaaggtgaaggggaagaagggtaccgaagcttacgtagaacaaaaactcatctcagaagaggatctgaatagcgccgtcgaccatcatcatcatcatcattga

SEQ ID NO: 654 - protein, 802 aa, Artificial Sequence
  Description of Artificial Sequence:Thermococcus species 9degreesN-7 mutant DNA polymerase, 9degreesN mutant
MILDTDYITENGKPVIRVFKKENGEFKIEYDRTFEPYFYALLKDDSAIEDVKKVTAKRHGTVVKVKRAEKVQKKFLGRPIEVWKLYFNHPQDVPAIRDRIRAHPAVVDIYEYDIPFAKRYLIDKGLIPMEGDEELTMLAFAIATLYHEGEEFGTGPILMISYADGSEARVITWKKIDLPYVDVVSTEKEMIKRFLRVVREKDPDVLITYNGDNFDFAYLKKRCEELGIKFTLGRDGSEPKIQRMGDRFAVEVKGRIHFDLYPVIRRTINLPTYTLEAVYEAVFGKPKEKVYAEEIAQAWESGEGLERVARYSMEDAKVTYELGREFFPMEAQLSRLIGQSLWDVSRSSTGNLVEAFLLRKAYKRNELAPNKPDERELARRRGGYAGGYVKEPERGLWDNIVYLDFRSWWPSIIITHNVSPDTLNREGCKEYDVAPEVGHKFCKDFPGFIPSLLGDLLEEASKIERKMKATVDPLEKKLLVYRQWLIKILANSFYGYYGYAKARWYCKECAESVTAWGREYIEMVIRELEEKFGFKVLYADTDGLHATIPGADAETVKKKAKEFLKYINPKLPGLLELEYEGFYVRGFFVTKKKYAVIDEEGKITTRGLEIVRRDWSEIAKETQARVLEAILKHGDVEEAVRIVKEVTEKLSKYEVPPEKLVIHEQITRDLRDYKATGPHVAVAKRLAARGVKIRPGTVISYIVLKGSGRIGDRAIPADEFDPTKHRYDAEYYIENQVLPAVERILKAFGYRKEDLRYQKTKQVGSGAWLKVKGKKGTEAYVEQKLISEEDLNSAVDHHHHHH

SEQ ID NO: 655 - DNA, 2409 bp, Artificial Sequence
  Description of Artificial Sequence:Thermococcus species 9degreesN-7 mutant DNA polymerase, 9degreesN mutant
atgattctcgataccgactacatcaccgagaacgggaagcccgtgataagggtcttcaagaaggagaacggcgagtttaaaatcgagtacgacagaaccttcgagccctacttctacgcccttctgaaggacgattctgcgatagaggacgtcaagaaggtaaccgcaaagaggcacggaacggttgtcaaggtgaagcgcgccgagaaggtgcagaagaagttcctcggcaggccgatagaggtctggaagctctacttcaaccatcctcaggacgtcccggcgattcgagacaggatacgcgcccaccccgctgtcgttgacatctacgagtacgacatacccttcgccaagcgctacctcatcgacaagggcctgattccgatggagggcgacgaggagcttacgatgctcgccttcgcgatcgcaaccctctatcacgagggcgaggagttcggaaccgggccgattctcatgataagctacgccgacgggagcgaggcgagggtgataacctggaagaagattgaccttccgtacgttgacgtcgtctcgaccgagaaggagatgattaagcgcttcctccgcgtcgtcagggagaaggaccccgacgtgctcatcacctacaacggcgacaacttcgacttcgcctacctgaagaagcgctgtgaggaactcggaataaagttcacactcggcagggacgggagcgagccgaagatacagcgaatgggcgaccgctttgccgttgaggtgaagggcaggattcacttcgacctctaccccgtcataaggcgcacgataaacctcccgacctacacccttgaggccgtttacgaggccgtctttggaaagcccaaggagaaggtttacgcagaggagatagcgcaggcctgggagagcggggagggccttgaaagggttgcaagatactcgatggaggacgctaaggtgacctacgagctgggaagggagttcttcccgatggaggcccagctttcgaggcttataggccagagcctctgggacgtctcgcgctcgagcaccggaaatttggtggaggcattcctcctgcggaaggcctacaagaggaacgagctcgccccaaacaagcccgacgagagggagctcgcgagacggcgcgggggctacgctggcgggtacgttaaggaaccagagcggggattgtgggacaacattgtgtatttagacttccgctcgtggcacccttcaatcatcataacccacaacgtctcgccggataccctcaaccgcgagggctgtaaagagtacgacgtcgcccctgaggttggacacaagttctgcaaggacttccccggcttcataccaagcctcctgggagatttgctcgaggaggcgagcaagatagagcggaagatgaaggcaacggttgacccgctggagaagaaactcctcgtgtacaggcagtggcttataaaaatcctcgccaacagcttctacggctactacggctacgccaaggcccggtggtactgcaaggagtgcgccgagagcgttacggcctggggaagggagtatatagaaatggttatccgggaactcgaagaaaaattcggttttaaagttctctatgccgatacagacggtctccatgctaccattcccggagcagacgctgaaacagtcaagaaaaaagcaaaggagttcttaaaatacattaatccaaaactgcccggcctgctcgaacttgagtacgagggcttctacgtgaggggcttcttcgtcacgaagaagaagtacgctgtgatagacgaggagggcaagataaccacgaggggtcttgagattgtgaggcgcgactggagcgagatagcgaaggagacccaggccagggtcttagaggcgatactcaagcacggtgacgtcgaggaggccgttaggatagtcaaggaagtgacggaaaagctgagcaagtatgaggtcccgcccgagaagctggtaatccacgagcagataacgcgcgatttgagggattacaaagccaccggcccgcacgttgccgttgcgaagaggctcgcggcgcgtggagtgaaaatccggcccggcacggtgataagctacatcgtcctaaagggctctggaaggataggcgacagggcgattccagctgatgagttcgacccgacgaagcaccgctacgatgcggaatactacatcgagaaccaggttctcccggcggtggagaggattctaaaagccttcggctatcggaaggaggatttgcgctaccagaagacgaagcaggtcggctcgggcgcgtggctgaaggtgaaggggaagaagggtaccgaagcttacgtagaacaaaaactcatctcagaagaggatctgaatagcgccgtcgaccatcatcatcatcatcattga

SEQ ID NO: 656 - protein, 802 aa, Artificial Sequence
  Description of Artificial Sequence:Thermococcus species 9degreesN-7 mutant DNA polymerase, 9degreesN mutant
MILDTDYITENGKPVIRVFKKENGEFKIEYDRTFEPYFYALLKDDSAIEDVKKVTAKRHGTVVKVKRAEKVQKKFLGRPIEVWKLYFNHPQDVPAIRDRIRAHPAVVDIYEYDIPFAKRYLIDKGLIPMEGDEELTMLAFAIATLYHEGEEFGTGPILMISYADGSEARVITWKKIDLPYVDVVSTEKEMIKRFLRVVREKDPDVLITYNGDNFDFAYLKKRCEELGIKFTLGRDGSEPKIQRMGDRFAVEVKGRIHFDLYPVIRRTINLPTYTLEAVYEAVFGKPKEKVYAEEIAQAWESGEGLERVARYSMEDAKVTYELGREFFPMEAQLSRLIGQSLWDVSRSSTGNLVEAFLLRKAYKRNELAPNKPDERELARRRGGYAGGYVKEPERGLWDNIVYLDFRSWHPSIIITHNVSPDTLNREGCKEYDVAPEVGHKFCKDFPGFIPSLLGDLLEEASKIERKMKATVDPLEKKLLVYRQWLIKILANSFYGYYGYAKARWYCKECAESVTAWGREYIEMVIRELEEKFGFKVLYADTDGLHATIPGADAETVKKKAKEFLKYINPKLPGLLELEYEGFYVRGFFVTKKKYAVIDEEGKITTRGLEIVRRDWSEIAKETQARVLEAILKHGDVEEAVRIVKEVTEKLSKYEVPPEKLVIHEQITRDLRDYKATGPHVAVAKRLAARGVKIRPGTVISYIVLKGSGRIGDRAIPADEFDPTKHRYDAEYYIENQVLPAVERILKAFGYRKEDLRYQKTKQVGSGAWLKVKGKKGTEAYVEQKLISEEDLNSAVDHHHHHH

SEQ ID NO: 657 - DNA, 2409 bp, Artificial Sequence
  Description of Artificial Sequence:Thermococcus species 9degreesN-7 mutant DNA polymerase, 9degreesN mutant
atgattctcgataccgactacatcaccgagaacgggaagcccgtgataagggtcttcaagaaggagaacggcgagtttaaaatcgagtacgacagaaccttcgagccctacttctacgcccttctgaaggacgattctgcgatagaggacgtcaagaaggtaaccgcaaagaggcacggaacggttgtcaaggtgaagcgcgccgagaaggtgcagaagaagttcctcggcaggccgatagaggtctggaagctctacttcaaccatcctcaggacgtcccggcgattcgagacaggatacgcgcccaccccgctgtcgttgacatctacgagtacgacatacccttcgccaagcgctacctcatcgacaagggcctgattccgatggagggcgacgaggagcttacgatgctcgccttcgcgatcgcaaccctctatcacgagggcgaggagttcggaaccgggccgattctcatgataagctacgccgacgggagcgaggcgagggtgataacctggaagaagattgaccttccgtacgttgacgtcgtctcgaccgagaaggagatgattaagcgcttcctccgcgtcgtcagggagaaggaccccgacgtgctcatcacctacaacggcgacaacttcgacttcgcctacctgaagaagcgctgtgaggaactcggaataaagttcacactcggcagggacgggagcgagccgaagatacagcgaatgggcgaccgctttgccgttgaggtgaagggcaggattcacttcgacctctaccccgtcataaggcgcacgataaacctcccgacctacacccttgaggccgtttacgaggccgtctttggaaagcccaaggagaaggtttacgcagaggagatagcgcaggcctgggagagcggggagggccttgaaagggttgcaagatactcgatggaggacgctaaggtgacctacgagctgggaagggagttcttcccgatggaggcccagctttcgaggcttataggccagagcctctgggacgtctcgcgctcgagcaccggaaatttggtggaggcattcctcctgcggaaggcctacaagaggaacgagctcgccccaaacaagcccgacgagagggagctcgcgagacggcgcgggggctacgctggcgggtacgttaaggaaccagagcggggattgtgggacaacattgtgtatttagacttccgctcgtgggagccttcaatcatcataacccacaacgtctcgccggataccctcaaccgcgagggctgtaaagagtacgacgtcgcccctgaggttggacacaagttctgcaaggacttccccggcttcataccaagcctcctgggagatttgctcgaggaggcgagcaagatagagcggaagatgaaggcaacggttgacccgctggagaagaaactcctcgtgtacaggcagtggcttataaaaatcctcgccaacagcttctacggctactacggctacgccaaggcccggtggtactgcaaggagtgcgccgagagcgttacggcctggggaagggagtatatagaaatggttatccgggaactcgaagaaaaattcggttttaaagttctctatgccgatacagacggtctccatgctaccattcccggagcagacgctgaaacagtcaagaaaaaagcaaaggagttcttaaaatacattaatccaaaactgcccggcctgctcgaacttgagtacgagggcttctacgtgaggggcttcttcgtcacgaagaagaagtacgctgtgatagacgaggagggcaagataaccacgaggggtcttgagattgtgaggcgcgactggagcgagatagcgaaggagacccaggccagggtcttagaggcgatactcaagcacggtgacgtcgaggaggccgttaggatagtcaaggaagtgacggaaaagctgagcaagtatgaggtcccgcccgagaagctggtaatccacgagcagataacgcgcgatttgagggattacaaagccaccggcccgcacgttgccgttgcgaagaggctcgcggcgcgtggagtgaaaatccggcccggcacggtgataagctacatcgtcctaaagggctctggaaggataggcgacagggcgattccagctgatgagttcgacccgacgaagcaccgctacgatgcggaatactacatcgagaaccaggttctcccggcggtggagaggattctaaaagccttcggctatcggaaggaggatttgcgctaccagaagacgaagcaggtcggctcgggcgcgtggctgaaggtgaaggggaagaagggtaccgaagcttacgtagaacaaaaactcatctcagaagaggatctgaatagcgccgtcgaccatcatcatcatcatcattga

SEQ ID NO: 658 - protein, 802 aa, Artificial Sequence
  Description of Artificial Sequence:Thermococcus species 9degreesN-7 mutant DNA polymerase, 9degreesN mutant
MILDTDYITENGKPVIRVFKKENGEFKIEYDRTFEPYFYALLKDDSAIEDVKKVTAKRHGTVVKVKRAEKVQKKFLGRPIEVWKLYFNHPQDVPAIRDRIRAHPAVVDIYEYDIPFAKRYLIDKGLIPMEGDEELTMLAFAIATLYHEGEEFGTGPILMISYADGSEARVITWKKIDLPYVDVVSTEKEMIKRFLRVVREKDPDVLITYNGDNFDFAYLKKRCEELGIKFTLGRDGSEPKIQRMGDRFAVEVKGRIHFDLYPVIRRTINLPTYTLEAVYEAVFGKPKEKVYAEEIAQAWESGEGLERVARYSMEDAKVTYELGREFFPMEAQLSRLIGQSLWDVSRSSTGNLVEAFLLRKAYKRNELAPNKPDERELARRRGGYAGGYVKEPERGLWDNIVYLDFRSWEPSIIITHNVSPDTLNREGCKEYDVAPEVGHKFCKDFPGFIPSLLGDLLEEASKIERKMKATVDPLEKKLLVYRQWLIKILANSFYGYYGYAKARWYCKECAESVTAWGREYIEMVIRELEEKFGFKVLYADTDGLHATIPGADAETVKKKAKEFLKYINPKLPGLLELEYEGFYVRGFFVTKKKYAVIDEEGKITTRGLEIVRRDWSEIAKETQARVLEAILKHGDVEEAVRIVKEVTEKLSKYEVPPEKLVIHEQITRDLRDYKATGPHVAVAKRLAARGVKIRPGTVISYIVLKGSGRIGDRAIPADEFDPTKHRYDAEYYIENQVLPAVERILKAFGYRKEDLRYQKTKQVGSGAWLKVKGKKGTEAYVEQKLISEEDLNSAVDHHHHHH

SEQ ID NO: 659 - DNA, 2409 bp, Artificial Sequence
  Description of Artificial Sequence:Thermococcus species 9degreesN-7 mutant DNA polymerase, 9degreesN mutant
atgattctcgataccgactacatcaccgagaacgggaagcccgtgataagggtcttcaagaaggagaacggcgagtttaaaatcgagtacgacagaaccttcgagccctacttctacgcccttctgaaggacgattctgcgatagaggacgtcaagaaggtaaccgcaaagaggcacggaacggttgtcaaggtgaagcgcgccgagaaggtgcagaagaagttcctcggcaggccgatagaggtctggaagctctacttcaaccatcctcaggacgtcccggcgattcgagacaggatacgcgcccaccccgctgtcgttgacatctacgagtacgacatacccttcgccaagcgctacctcatcgacaagggcctgattccgatggagggcgacgaggagcttacgatgctcgccttcgcgatcgcaaccctctatcacgagggcgaggagttcggaaccgggccgattctcatgataagctacgccgacgggagcgaggcgagggtgataacctggaagaagattgaccttccgtacgttgacgtcgtctcgaccgagaaggagatgattaagcgcttcctccgcgtcgtcagggagaaggaccccgacgtgctcatcacctacaacggcgacaacttcgacttcgcctacctgaagaagcgctgtgaggaactcggaataaagttcacactcggcagggacgggagcgagccgaagatacagcgaatgggcgaccgctttgccgttgaggtgaagggcaggattcacttcgacctctaccccgtcataaggcgcacgataaacctcccgacctacacccttgaggccgtttacgaggccgtctttggaaagcccaaggagaaggtttacgcagaggagatagcgcaggcctgggagagcggggagggccttgaaagggttgcaagatactcgatggaggacgctaaggtgacctacgagctgggaagggagttcttcccgatggaggcccagctttcgaggcttataggccagagcctctgggacgtctcgcgctcgagcaccggaaatttggtggaggcattcctcctgcggaaggcctacaagaggaacgagctcgccccaaacaagcccgacgagagggagctcgcgagacggcgcgggggctacgctggcgggtacgttaaggaaccagagcggggattgtgggacaacattgtgtatttagacttccgctcgtggaccccttcaatcatcataacccacaacgtctcgccggataccctcaaccgcgagggctgtaaagagtacgacgtcgcccctgaggttggacacaagttctgcaaggacttccccggcttcataccaagcctcctgggagatttgctcgaggaggcgagcaagatagagcggaagatgaaggcaacggttgacccgctggagaagaaactcctcgtgtacaggcagtggcttataaaaatcctcgccaacagcttctacggctactacggctacgccaaggcccggtggtactgcaaggagtgcgccgagagcgttacggcctggggaagggagtatatagaaatggttatccgggaactcgaagaaaaattcggttttaaagttctctatgccgatacagacggtctccatgctaccattcccggagcagacgctgaaacagtcaagaaaaaagcaaaggagttcttaaaatacattaatccaaaactgcccggcctgctcgaacttgagtacgagggcttctacgtgaggggcttcttcgtcacgaagaagaagtacgctgtgatagacgaggagggcaagataaccacgaggggtcttgagattgtgaggcgcgactggagcgagatagcgaaggagacccaggccagggtcttagaggcgatactcaagcacggtgacgtcgaggaggccgttaggatagtcaaggaagtgacggaaaagctgagcaagtatgaggtcccgcccgagaagctggtaatccacgagcagataacgcgcgatttgagggattacaaagccaccggcccgcacgttgccgttgcgaagaggctcgcggcgcgtggagtgaaaatccggcccggcacggtgataagctacatcgtcctaaagggctctggaaggataggcgacagggcgattccagctgatgagttcgacccgacgaagcaccgctacgatgcggaatactacatcgagaaccaggttctcccggcggtggagaggattctaaaagccttcggctatcggaaggaggatttgcgctaccagaagacgaagcaggtcggctcgggcgcgtggctgaaggtgaaggggaagaagggtaccgaagcttacgtagaacaaaaactcatctcagaagaggatctgaatagcgccgtcgaccatcatcatcatcatcattga

SEQ ID NO: 660 - protein, 802 aa, Artificial Sequence
  Description of Artificial Sequence:Thermococcus species 9degreesN-7 mutant DNA polymerase, 9degreesN mutant
MILDTDYITENGKPVIRVFKKENGEFKIEYDRTFEPYFYALLKDDSAIEDVKKVTAKRHGTVVKVKRAEKVQKKFLGRPIEVWKLYFNHPQDVPAIRDRIRAHPAVVDIYEYDIPFAKRYLIDKGLIPMEGDEELTMLAFAIATLYHEGEEFGTGPILMISYADGSEARVITWKKIDLPYVDVVSTEKEMIKRFLRVVREKDPDVLITYNGDNFDFAYLKKRCEELGIKFTLGRDGSEPKIQRMGDRFAVEVKGRIHFDLYPVIRRTINLPTYTLEAVYEAVFGKPKEKVYAEEIAQAWESGEGLERVARYSMEDAKVTYELGREFFPMEAQLSRLIGQSLWDVSRSSTGNLVEAFLLRKAYKRNELAPNKPDERELARRRGGYAGGYVKEPERGLWDNIVYLDFRSWTPSIIITHNVSPDTLNREGCKEYDVAPEVGHKFCKDFPGFIPSLLGDLLEEASKIERKMKATVDPLEKKLLVYRQWLIKILANSFYGYYGYAKARWYCKECAESVTAWGREYIEMVIRELEEKFGFKVLYADTDGLHATIPGADAETVKKKAKEFLKYINPKLPGLLELEYEGFYVRGFFVTKKKYAVIDEEGKITTRGLEIVRRDWSEIAKETQARVLEAILKHGDVEEAVRIVKEVTEKLSKYEVPPEKLVIHEQITRDLRDYKATGPHVAVAKRLAARGVKIRPGTVISYIVLKGSGRIGDRAIPADEFDPTKHRYDAEYYIENQVLPAVERILKAFGYRKEDLRYQKTKQVGSGAWLKVKGKKGTEAYVEQKLISEEDLNSAVDHHHHHH

SEQ ID NO: 661 - DNA, 2409 bp, Artificial Sequence
  Description of Artificial Sequence:Thermococcus species 9degreesN-7 mutant DNA polymerase, 9degreesN mutant
atgattctcgataccgactacatcaccgagaacgggaagcccgtgataagggtcttcaagaaggagaacggcgagtttaaaatcgagtacgacagaaccttcgagccctacttctacgcccttctgaaggacgattctgcgatagaggacgtcaagaaggtaaccgcaaagaggcacggaacggttgtcaaggtgaagcgcgccgagaaggtgcagaagaagttcctcggcaggccgatagaggtctggaagctctacttcaaccatcctcaggacgtcccggcgattcgagacaggatacgcgcccaccccgctgtcgttgacatctacgagtacgacatacccttcgccaagcgctacctcatcgacaagggcctgattccgatggagggcgacgaggagcttacgatgctcgccttcgcgatcgcaaccctctatcacgagggcgaggagttcggaaccgggccgattctcatgataagctacgccgacgggagcgaggcgagggtgataacctggaagaagattgaccttccgtacgttgacgtcgtctcgaccgagaaggagatgattaagcgcttcctccgcgtcgtcagggagaaggaccccgacgtgctcatcacctacaacggcgacaacttcgacttcgcctacctgaagaagcgctgtgaggaactcggaataaagttcacactcggcagggacgggagcgagccgaagatacagcgaatgggcgaccgctttgccgttgaggtgaagggcaggattcacttcgacctctaccccgtcataaggcgcacgataaacctcccgacctacacccttgaggccgtttacgaggccgtctttggaaagcccaaggagaaggtttacgcagaggagatagcgcaggcctgggagagcggggagggccttgaaagggttgcaagatactcgatggaggacgctaaggtgacctacgagctgggaagggagttcttcccgatggaggcccagctttcgaggcttataggccagagcctctgggacgtctcgcgctcgagcaccggaaatttggtggaggcattcctcctgcggaaggcctacaagaggaacgagctcgccccaaacaagcccgacgagagggagctcgcgagacggcgcgggggctacgctggcgggtacgttaaggaaccagagcggggattgtgggacaacattgtgtatttagacttccgctcgtggaggccttcaatcatcataacccacaacgtctcgccggataccctcaaccgcgagggctgtaaagagtacgacgtcgcccctgaggttggacacaagttctgcaaggacttccccggcttcataccaagcctcctgggagatttgctcgaggaggcgagcaagatagagcggaagatgaaggcaacggttgacccgctggagaagaaactcctcgtgtacaggcagtggcttataaaaatcctcgccaacagcttctacggctactacggctacgccaaggcccggtggtactgcaaggagtgcgccgagagcgttacggcctggggaagggagtatatagaaatggttatccgggaactcgaagaaaaattcggttttaaagttctctatgccgatacagacggtctccatgctaccattcccggagcagacgctgaaacagtcaagaaaaaagcaaaggagttcttaaaatacattaatccaaaactgcccggcctgctcgaacttgagtacgagggcttctacgtgaggggcttcttcgtcacgaagaagaagtacgctgtgatagacgaggagggcaagataaccacgaggggtcttgagattgtgaggcgcgactggagcgagatagcgaaggagacccaggccagggtcttagaggcgatactcaagcacggtgacgtcgaggaggccgttaggatagtcaaggaagtgacggaaaagctgagcaagtatgaggtcccgcccgagaagctggtaatccacgagcagataacgcgcgatttgagggattacaaagccaccggcccgcacgttgccgttgcgaagaggctcgcggcgcgtggagtgaaaatccggcccggcacggtgataagctacatcgtcctaaagggctctggaaggataggcgacagggcgattccagctgatgagttcgacccgacgaagcaccgctacgatgcggaatactacatcgagaaccaggttctcccggcggtggagaggattctaaaagccttcggctatcggaaggaggatttgcgctaccagaagacgaagcaggtcggctcgggcgcgtggctgaaggtgaaggggaagaagggtaccgaagcttacgtagaacaaaaactcatctcagaagaggatctgaatagcgccgtcgaccatcatcatcatcatcattga

SEQ ID NO: 662 - protein, 802 aa, Artificial Sequence
  Description of Artificial Sequence:Thermococcus species 9degreesN-7 mutant DNA polymerase, 9degreesN mutant
MILDTDYITENGKPVIRVFKKENGEFKIEYDRTFEPYFYALLKDDSAIEDVKKVTAKRHGTVVKVKRAEKVQKKFLGRPIEVWKLYFNHPQDVPAIRDRIRAHPAVVDIYEYDIPFAKRYLIDKGLIPMEGDEELTMLAFAIATLYHEGEEFGTGPILMISYADGSEARVITWKKIDLPYVDVVSTEKEMIKRFLRVVREKDPDVLITYNGDNFDFAYLKKRCEELGIKFTLGRDGSEPKIQRMGDRFAVEVKGRIHFDLYPVIRRTINLPTYTLEAVYEAVFGKPKEKVYAEEIAQAWESGEGLERVARYSMEDAKVTYELGREFFPMEAQLSRLIGQSLWDVSRSSTGNLVEAFLLRKAYKRNELAPNKPDERELARRRGGYAGGYVKEPERGLWDNIVYLDFRSWRPSIIITHNVSPDTLNREGCKEYDVAPEVGHKFCKDFPGFIPSLLGDLLEEASKIERKMKATVDPLEKKLLVYRQWLIKILANSFYGYYGYAKARWYCKECAESVTAWGREYIEMVIRELEEKFGFKVLYADTDGLHATIPGADAETVKKKAKEFLKYINPKLPGLLELEYEGFYVRGFFVTKKKYAVIDEEGKITTRGLEIVRRDWSEIAKETQARVLEAILKHGDVEEAVRIVKEVTEKLSKYEVPPEKLVIHEQITRDLRDYKATGPHVAVAKRLAARGVKIRPGTVISYIVLKGSGRIGDRAIPADEFDPTKHRYDAEYYIENQVLPAVERILKAFGYRKEDLRYQKTKQVGSGAWLKVKGKKGTEAYVEQKLISEEDLNSAVDHHHHHH

SEQ ID NO: 663 - DNA, 2409 bp, Artificial Sequence
  Description of Artificial Sequence:Thermococcus species 9degreesN-7 mutant DNA polymerase, 9degreesN mutant
atgattctcgataccgactacatcaccgagaacgggaagcccgtgataagggtcttcaagaaggagaacggcgagtttaaaatcgagtacgacagaaccttcgagccctacttctacgcccttctgaaggacgattctgcgatagaggacgtcaagaaggtaaccgcaaagaggcacggaacggttgtcaaggtgaagcgcgccgagaaggtgcagaagaagttcctcggcaggccgatagaggtctggaagctctacttcaaccatcctcaggacgtcccggcgattcgagacaggatacgcgcccaccccgctgtcgttgacatctacgagtacgacatacccttcgccaagcgctacctcatcgacaagggcctgattccgatggagggcgacgaggagcttacgatgctcgccttcgcgatcgcaaccctctatcacgagggcgaggagttcggaaccgggccgattctcatgataagctacgccgacgggagcgaggcgagggtgataacctggaagaagattgaccttccgtacgttgacgtcgtctcgaccgagaaggagatgattaagcgcttcctccgcgtcgtcagggagaaggaccccgacgtgctcatcacctacaacggcgacaacttcgacttcgcctacctgaagaagcgctgtgaggaactcggaataaagttcacactcggcagggacgggagcgagccgaagatacagcgaatgggcgaccgctttgccgttgaggtgaagggcaggattcacttcgacctctaccccgtcataaggcgcacgataaacctcccgacctacacccttgaggccgtttacgaggccgtctttggaaagcccaaggagaaggtttacgcagaggagatagcgcaggcctgggagagcggggagggccttgaaagggttgcaagatactcgatggaggacgctaaggtgacctacgagctgggaagggagttcttcccgatggaggcccagctttcgaggcttataggccagagcctctgggacgtctcgcgctcgagcaccggaaatttggtggaggcattcctcctgcggaaggcctacaagaggaacgagctcgccccaaacaagcccgacgagagggagctcgcgagacggcgcgggggctacgctggcgggtacgttaaggaaccagagcggggattgtgggacaacattgtgtatttagacttccgctcgtggctgccttcaatcatcataacccacaacgtctcgccggataccctcaaccgcgagggctgtaaagagtacgacgtcgcccctgaggttggacacaagttctgcaaggacttccccggcttcataccaagcctcctgggagatttgctcgaggaggcgagcaagatagagcggaagatgaaggcaacggttgacccgctggagaagaaactcctcgtgtacaggcagtggcttataaaaatcctcgccaacagcttctacggctactacggctacgccaaggcccggtggtactgcaaggagtgcgccgagagcgttacggcctggggaagggagtatatagaaatggttatccgggaactcgaagaaaaattcggttttaaagttctctatgccgatacagacggtctccatgctaccattcccggagcagacgctgaaacagtcaagaaaaaagcaaaggagttcttaaaatacattaatccaaaactgcccggcctgctcgaacttgagtacgagggcttctacgtgaggggcttcttcgtcacgaagaagaagtacgctgtgatagacgaggagggcaagataaccacgaggggtcttgagattgtgaggcgcgactggagcgagatagcgaaggagacccaggccagggtcttagaggcgatactcaagcacggtgacgtcgaggaggccgttaggatagtcaaggaagtgacggaaaagctgagcaagtatgaggtcccgcccgagaagctggtaatccacgagcagataacgcgcgatttgagggattacaaagccaccggcccgcacgttgccgttgcgaagaggctcgcggcgcgtggagtgaaaatccggcccggcacggtgataagctacatcgtcctaaagggctctggaaggataggcgacagggcgattccagctgatgagttcgacccgacgaagcaccgctacgatgcggaatactacatcgagaaccaggttctcccggcggtggagaggattctaaaagccttcggctatcggaaggaggatttgcgctaccagaagacgaagcaggtcggctcgggcgcgtggctgaaggtgaaggggaagaagggtaccgaagcttacgtagaacaaaaactcatctcagaagaggatctgaatagcgccgtcgaccatcatcatcatcatcattga

SEQ ID NO: 664 - protein, 802 aa, Artificial Sequence
  Description of Artificial Sequence:Thermococcus species 9degreesN-7 mutant DNA polymerase, 9degreesN mutant
MILDTDYITENGKPVIRVFKKENGEFKIEYDRTFEPYFYALLKDDSAIEDVKKVTAKRHGTVVKVKRAEKVQKKFLGRPIEVWKLYFNHPQDVPAIRDRIRAHPAVVDIYEYDIPFAKRYLIDKGLIPMEGDEELTMLAFAIATLYHEGEEFGTGPILMISYADGSEARVITWKKIDLPYVDVVSTEKEMIKRFLRVVREKDPDVLITYNGDNFDFAYLKKRCEELGIKFTLGRDGSEPKIQRMGDRFAVEVKGRIHFDLYPVIRRTINLPTYTLEAVYEAVFGKPKEKVYAEEIAQAWESGEGLERVARYSMEDAKVTYELGREFFPMEAQLSRLIGQSLWDVSRSSTGNLVEAFLLRKAYKRNELAPNKPDERELARRRGGYAGGYVKEPERGLWDNIVYLDFRSWLPSIIITHNVSPDTLNREGCKEYDVAPEVGHKFCKDFPGFIPSLLGDLLEEASKIERKMKATVDPLEKKLLVYRQWLIKILANSFYGYYGYAKARWYCKECAESVTAWGREYIEMVIRELEEKFGFKVLYADTDGLHATIPGADAETVKKKAKEFLKYINPKLPGLLELEYEGFYVRGFFVTKKKYAVIDEEGKITTRGLEIVRRDWSEIAKETQARVLEAILKHGDVEEAVRIVKEVTEKLSKYEVPPEKLVIHEQITRDLRDYKATGPHVAVAKRLAARGVKIRPGTVISYIVLKGSGRIGDRAIPADEFDPTKHRYDAEYYIENQVLPAVERILKAFGYRKEDLRYQKTKQVGSGAWLKVKGKKGTEAYVEQKLISEEDLNSAVDHHHHHH

SEQ ID NO: 665 - DNA, 2409 bp, Artificial Sequence
  Description of Artificial Sequence:Thermococcus species 9degreesN-7 mutant DNA polymerase, 9degreesN mutant
atgattctcgataccgactacatcaccgagaacgggaagcccgtgataagggtcttcaagaaggagaacggcgagtttaaaatcgagtacgacagaaccttcgagccctacttctacgcccttctgaaggacgattctgcgatagaggacgtcaagaaggtaaccgcaaagaggcacggaacggttgtcaaggtgaagcgcgccgagaaggtgcagaagaagttcctcggcaggccgatagaggtctggaagctctacttcaaccatcctcaggacgtcccggcgattcgagacaggatacgcgcccaccccgctgtcgttgacatctacgagtacgacatacccttcgccaagcgctacctcatcgacaagggcctgattccgatggagggcgacgaggagcttacgatgctcgccttcgcgatcgcaaccctctatcacgagggcgaggagttcggaaccgggccgattctcatgataagctacgccgacgggagcgaggcgagggtgataacctggaagaagattgaccttccgtacgttgacgtcgtctcgaccgagaaggagatgattaagcgcttcctccgcgtcgtcagggagaaggaccccgacgtgctcatcacctacaacggcgacaacttcgacttcgcctacctgaagaagcgctgtgaggaactcggaataaagttcacactcggcagggacgggagcgagccgaagatacagcgaatgggcgaccgctttgccgttgaggtgaagggcaggattcacttcgacctctaccccgtcataaggcgcacgataaacctcccgacctacacccttgaggccgtttacgaggccgtctttggaaagcccaaggagaaggtttacgcagaggagatagcgcaggcctgggagagcggggagggccttgaaagggttgcaagatactcgatggaggacgctaaggtgacctacgagctgggaagggagttcttcccgatggaggcccagctttcgaggcttataggccagagcctctgggacgtctcgcgctcgagcaccggaaatttggtggaggcattcctcctgcggaaggcctacaagaggaacgagctcgccccaaacaagcccgacgagagggagctcgcgagacggcgcgggggctacgctggcgggtacgttaaggaaccagagcggggattgtgggacaacattgtgtatttagacttccgctcgtggtgcccttcaatcatcataacccacaacgtctcgccggataccctcaaccgcgagggctgtaaagagtacgacgtcgcccctgaggttggacacaagttctgcaaggacttccccggcttcataccaagcctcctgggagatttgctcgaggaggcgagcaagatagagcggaagatgaaggcaacggttgacccgctggagaagaaactcctcgtgtacaggcagtggcttataaaaatcctcgccaacagcttctacggctactacggctacgccaaggcccggtggtactgcaaggagtgcgccgagagcgttacggcctggggaagggagtatatagaaatggttatccgggaactcgaagaaaaattcggttttaaagttctctatgccgatacagacggtctccatgctaccattcccggagcagacgctgaaacagtcaagaaaaaagcaaaggagttcttaaaatacattaatccaaaactgcccggcctgctcgaacttgagtacgagggcttctacgtgaggggcttcttcgtcacgaagaagaagtacgctgtgatagacgaggagggcaagataaccacgaggggtcttgagattgtgaggcgcgactggagcgagatagcgaaggagacccaggccagggtcttagaggcgatactcaagcacggtgacgtcgaggaggccgttaggatagtcaaggaagtgacggaaaagctgagcaagtatgaggtcccgcccgagaagctggtaatccacgagcagataacgcgcgatttgagggattacaaagccaccggcccgcacgttgccgttgcgaagaggctcgcggcgcgtggagtgaaaatccggcccggcacggtgataagctacatcgtcctaaagggctctggaaggataggcgacagggcgattccagctgatgagttcgacccgacgaagcaccgctacgatgcggaatactacatcgagaaccaggttctcccggcggtggagaggattctaaaagccttcggctatcggaaggaggatttgcgctaccagaagacgaagcaggtcggctcgggcgcgtggctgaaggtgaaggggaagaagggtaccgaagcttacgtagaacaaaaactcatctcagaagaggatctgaatagcgccgtcgaccatcatcatcatcatcattga

SEQ ID NO: 666 - protein, 802 aa, Artificial Sequence
  Description of Artificial Sequence:Thermococcus species 9degreesN-7 mutant DNA polymerase, 9degreesN mutant
MILDTDYITENGKPVIRVFKKENGEFKIEYDRTFEPYFYALLKDDSAIEDVKKVTAKRHGTVVKVKRAEKVQKKFLGRPIEVWKLYFNHPQDVPAIRDRIRAHPAVVDIYEYDIPFAKRYLIDKGLIPMEGDEELTMLAFAIATLYHEGEEFGTGPILMISYADGSEARVITWKKIDLPYVDVVSTEKEMIKRFLRVVREKDPDVLITYNGDNFDFAYLKKRCEELGIKFTLGRDGSEPKIQRMGDRFAVEVKGRIHFDLYPVIRRTINLPTYTLEAVYEAVFGKPKEKVYAEEIAQAWESGEGLERVARYSMEDAKVTYELGREFFPMEAQLSRLIGQSLWDVSRSSTGNLVEAFLLRKAYKRNELAPNKPDERELARRRGGYAGGYVKEPERGLWDNIVYLDFRSWCPSIIITHNVSPDTLNREGCKEYDVAPEVGHKFCKDFPGFIPSLLGDLLEEASKIERKMKATVDPLEKKLLVYRQWLIKILANSFYGYYGYAKARWYCKECAESVTAWGREYIEMVIRELEEKFGFKVLYADTDGLHATIPGADAETVKKKAKEFLKYINPKLPGLLELEYEGFYVRGFFVTKKKYAVIDEEGKITTRGLEIVRRDWSEIAKETQARVLEAILKHGDVEEAVRIVKEVTEKLSKYEVPPEKLVIHEQITRDLRDYKATGPHVAVAKRLAARGVKIRPGTVISYIVLKGSGRIGDRAIPADEFDPTKHRYDAEYYIENQVLPAVERILKAFGYRKEDLRYQKTKQVGSGAWLKVKGKKGTEAYVEQKLISEEDLNSAVDHHHHHH

SEQ ID NO: 667 - DNA, 2409 bp, Artificial Sequence
  Description of Artificial Sequence:Thermococcus species 9degreesN-7 mutant DNA polymerase, 9degreesN mutant
atgattctcgataccgactacatcaccgagaacgggaagcccgtgataagggtcttcaagaaggagaacggcgagtttaaaatcgagtacgacagaaccttcgagccctacttctacgcccttctgaaggacgattctgcgatagaggacgtcaagaaggtaaccgcaaagaggcacggaacggttgtcaaggtgaagcgcgccgagaaggtgcagaagaagttcctcggcaggccgatagaggtctggaagctctacttcaaccatcctcaggacgtcccggcgattcgagacaggatacgcgcccaccccgctgtcgttgacatctacgagtacgacatacccttcgccaagcgctacctcatcgacaagggcctgattccgatggagggcgacgaggagcttacgatgctcgccttcgcgatcgcaaccctctatcacgagggcgaggagttcggaaccgggccgattctcatgataagctacgccgacgggagcgaggcgagggtgataacctggaagaagattgaccttccgtacgttgacgtcgtctcgaccgagaaggagatgattaagcgcttcctccgcgtcgtcagggagaaggaccccgacgtgctcatcacctacaacggcgacaacttcgacttcgcctacctgaagaagcgctgtgaggaactcggaataaagttcacactcggcagggacgggagcgagccgaagatacagcgaatgggcgaccgctttgccgttgaggtgaagggcaggattcacttcgacctctaccccgtcataaggcgcacgataaacctcccgacctacacccttgaggccgtttacgaggccgtctttggaaagcccaaggagaaggtttacgcagaggagatagcgcaggcctgggagagcggggagggccttgaaagggttgcaagatactcgatggaggacgctaaggtgacctacgagctgggaagggagttcttcccgatggaggcccagctttcgaggcttataggccagagcctctgggacgtctcgcgctcgagcaccggaaatttggtggaggcattcctcctgcggaaggcctacaagaggaacgagctcgccccaaacaagcccgacgagagggagctcgcgagacggcgcgggggctacgctggcgggtacgttaaggaaccagagcggggattgtgggacaacattgtgtatttagacttccgctcgtgggtgccttcaatcatcataacccacaacgtctcgccggataccctcaaccgcgagggctgtaaagagtacgacgtcgcccctgaggttggacacaagttctgcaaggacttccccggcttcataccaagcctcctgggagatttgctcgaggaggcgagcaagatagagcggaagatgaaggcaacggttgacccgctggagaagaaactcctcgtgtacaggcagtggcttataaaaatcctcgccaacagcttctacggctactacggctacgccaaggcccggtggtactgcaaggagtgcgccgagagcgttacggcctggggaagggagtatatagaaatggttatccgggaactcgaagaaaaattcggttttaaagttctctatgccgatacagacggtctccatgctaccattcccggagcagacgctgaaacagtcaagaaaaaagcaaaggagttcttaaaatacattaatccaaaactgcccggcctgctcgaacttgagtacgagggcttctacgtgaggggcttcttcgtcacgaagaagaagtacgctgtgatagacgaggagggcaagataaccacgaggggtcttgagattgtgaggcgcgactggagcgagatagcgaaggagacccaggccagggtcttagaggcgatactcaagcacggtgacgtcgaggaggccgttaggatagtcaaggaagtgacggaaaagctgagcaagtatgaggtcccgcccgagaagctggtaatccacgagcagataacgcgcgatttgagggattacaaagccaccggcccgcacgttgccgttgcgaagaggctcgcggcgcgtggagtgaaaatccggcccggcacggtgataagctacatcgtcctaaagggctctggaaggataggcgacagggcgattccagctgatgagttcgacccgacgaagcaccgctacgatgcggaatactacatcgagaaccaggttctcccggcggtggagaggattctaaaagccttcggctatcggaaggaggatttgcgctaccagaagacgaagcaggtcggctcgggcgcgtggctgaaggtgaaggggaagaagggtaccgaagcttacgtagaacaaaaactcatctcagaagaggatctgaatagcgccgtcgaccatcatcatcatcatcattga

SEQ ID NO: 668 - protein, 802 aa, Artificial Sequence
  Description of Artificial Sequence:Thermococcus species 9degreesN-7 mutant DNA polymerase, 9degreesN mutant
MILDTDYITENGKPVIRVFKKENGEFKIEYDRTFEPYFYALLKDDSAIEDVKKVTAKRHGTVVKVKRAEKVQKKFLGRPIEVWKLYFNHPQDVPAIRDRIRAHPAVVDIYEYDIPFAKRYLIDKGLIPMEGDEELTMLAFAIATLYHEGEEFGTGPILMISYADGSEARVITWKKIDLPYVDVVSTEKEMIKRFLRVVREKDPDVLITYNGDNFDFAYLKKRCEELGIKFTLGRDGSEPKIQRMGDRFAVEVKGRIHFDLYPVIRRTINLPTYTLEAVYEAVFGKPKEKVYAEEIAQAWESGEGLERVARYSMEDAKVTYELGREFFPMEAQLSRLIGQSLWDVSRSSTGNLVEAFLLRKAYKRNELAPNKPDERELARRRGGYAGGYVKEPERGLWDNIVYLDFRSWVPSIIITHNVSPDTLNREGCKEYDVAPEVGHKFCKDFPGFIPSLLGDLLEEASKIERKMKATVDPLEKKLLVYRQWLIKILANSFYGYYGYAKARWYCKECAESVTAWGREYIEMVIRELEEKFGFKVLYADTDGLHATIPGADAETVKKKAKEFLKYINPKLPGLLELEYEGFYVRGFFVTKKKYAVIDEEGKITTRGLEIVRRDWSEIAKETQARVLEAILKHGDVEEAVRIVKEVTEKLSKYEVPPEKLVIHEQITRDLRDYKATGPHVAVAKRLAARGVKIRPGTVISYIVLKGSGRIGDRAIPADEFDPTKHRYDAEYYIENQVLPAVERILKAFGYRKEDLRYQKTKQVGSGAWLKVKGKKGTEAYVEQKLISEEDLNSAVDHHHHHH

SEQ ID NO: 669 - DNA, 2409 bp, Artificial Sequence
  Description of Artificial Sequence:Thermococcus species 9degreesN-7 mutant DNA polymerase, 9degreesN mutant
atgattctcgataccgactacatcaccgagaacgggaagcccgtgataagggtcttcaagaaggagaacggcgagtttaaaatcgagtacgacagaaccttcgagccctacttctacgcccttctgaaggacgattctgcgatagaggacgtcaagaaggtaaccgcaaagaggcacggaacggttgtcaaggtgaagcgcgccgagaaggtgcagaagaagttcctcggcaggccgatagaggtctggaagctctacttcaaccatcctcaggacgtcccggcgattcgagacaggatacgcgcccaccccgctgtcgttgacatctacgagtacgacatacccttcgccaagcgctacctcatcgacaagggcctgattccgatggagggcgacgaggagcttacgatgctcgccttcgcgatcgcaaccctctatcacgagggcgaggagttcggaaccgggccgattctcatgataagctacgccgacgggagcgaggcgagggtgataacctggaagaagattgaccttccgtacgttgacgtcgtctcgaccgagaaggagatgattaagcgcttcctccgcgtcgtcagggagaaggaccccgacgtgctcatcacctacaacggcgacaacttcgacttcgcctacctgaagaagcgctgtgaggaactcggaataaagttcacactcggcagggacgggagcgagccgaagatacagcgaatgggcgaccgctttgccgttgaggtgaagggcaggattcacttcgacctctaccccgtcataaggcgcacgataaacctcccgacctacacccttgaggccgtttacgaggccgtctttggaaagcccaaggagaaggtttacgcagaggagatagcgcaggcctgggagagcggggagggccttgaaagggttgcaagatactcgatggaggacgctaaggtgacctacgagctgggaagggagttcttcccgatggaggcccagctttcgaggcttataggccagagcctctgggacgtctcgcgctcgagcaccggaaatttggtggaggcattcctcctgcggaaggcctacaagaggaacgagctcgccccaaacaagcccgacgagagggagctcgcgagacggcgcgggggctacgctggcgggtacgttaaggaaccagagcggggattgtgggacaacattgtgtatttagacttccgctcgtggccaccttcaatcatcataacccacaacgtctcgccggataccctcaaccgcgagggctgtaaagagtacgacgtcgcccctgaggttggacacaagttctgcaaggacttccccggcttcataccaagcctcctgggagatttgctcgaggaggcgagcaagatagagcggaagatgaaggcaacggttgacccgctggagaagaaactcctcgtgtacaggcagtggcttataaaaatcctcgccaacagcttctacggctactacggctacgccaaggcccggtggtactgcaaggagtgcgccgagagcgttacggcctggggaagggagtatatagaaatggttatccgggaactcgaagaaaaattcggttttaaagttctctatgccgatacagacggtctccatgctaccattcccggagcagacgctgaaacagtcaagaaaaaagcaaaggagttcttaaaatacattaatccaaaactgcccggcctgctcgaacttgagtacgagggcttctacgtgaggggcttcttcgtcacgaagaagaagtacgctgtgatagacgaggagggcaagataaccacgaggggtcttgagattgtgaggcgcgactggagcgagatagcgaaggagacccaggccagggtcttagaggcgatactcaagcacggtgacgtcgaggaggccgttaggatagtcaaggaagtgacggaaaagctgagcaagtatgaggtcccgcccgagaagctggtaatccacgagcagataacgcgcgatttgagggattacaaagccaccggcccgcacgttgccgttgcgaagaggctcgcggcgcgtggagtgaaaatccggcccggcacggtgataagctacatcgtcctaaagggctctggaaggataggcgacagggcgattccagctgatgagttcgacccgacgaagcaccgctacgatgcggaatactacatcgagaaccaggttctcccggcggtggagaggattctaaaagccttcggctatcggaaggaggatttgcgctaccagaagacgaagcaggtcggctcgggcgcgtggctgaaggtgaaggggaagaagggtaccgaagcttacgtagaacaaaaactcatctcagaagaggatctgaatagcgccgtcgaccatcatcatcatcatcattga

SEQ ID NO: 670 - protein, 802 aa, Artificial Sequence
  Description of Artificial Sequence:Thermococcus species 9degreesN-7 mutant DNA polymerase, 9degreesN mutant
MILDTDYITENGKPVIRVFKKENGEFKIEYDRTFEPYFYALLKDDSAIEDVKKVTAKRHGTVVKVKRAEKVQKKFLGRPIEVWKLYFNHPQDVPAIRDRIRAHPAVVDIYEYDIPFAKRYLIDKGLIPMEGDEELTMLAFAIATLYHEGEEFGTGPILMISYADGSEARVITWKKIDLPYVDVVSTEKEMIKRFLRVVREKDPDVLITYNGDNFDFAYLKKRCEELGIKFTLGRDGSEPKIQRMGDRFAVEVKGRIHFDLYPVIRRTINLPTYTLEAVYEAVFGKPKEKVYAEEIAQAWESGEGLERVARYSMEDAKVTYELGREFFPMEAQLSRLIGQSLWDVSRSSTGNLVEAFLLRKAYKRNELAPNKPDERELARRRGGYAGGYVKEPERGLWDNIVYLDFRSWPPSIIITHNVSPDTLNREGCKEYDVAPEVGHKFCKDFPGFIPSLLGDLLEEASKIERKMKATVDPLEKKLLVYRQWLIKILANSFYGYYGYAKARWYCKECAESVTAWGREYIEMVIRELEEKFGFKVLYADTDGLHATIPGADAETVKKKAKEFLKYINPKLPGLLELEYEGFYVRGFFVTKKKYAVIDEEGKITTRGLEIVRRDWSEIAKETQARVLEAILKHGDVEEAVRIVKEVTEKLSKYEVPPEKLVIHEQITRDLRDYKATGPHVAVAKRLAARGVKIRPGTVISYIVLKGSGRIGDRAIPADEFDPTKHRYDAEYYIENQVLPAVERILKAFGYRKEDLRYQKTKQVGSGAWLKVKGKKGTEAYVEQKLISEEDLNSAVDHHHHHH

SEQ ID NO: 671 - DNA, 2409 bp, Artificial Sequence
  Description of Artificial Sequence:Thermococcus species 9degreesN-7 mutant DNA polymerase, 9degreesN mutant
atgattctcgataccgactacatcaccgagaacgggaagcccgtgataagggtcttcaagaaggagaacggcgagtttaaaatcgagtacgacagaaccttcgagccctacttctacgcccttctgaaggacgattctgcgatagaggacgtcaagaaggtaaccgcaaagaggcacggaacggttgtcaaggtgaagcgcgccgagaaggtgcagaagaagttcctcggcaggccgatagaggtctggaagctctacttcaaccatcctcaggacgtcccggcgattcgagacaggatacgcgcccaccccgctgtcgttgacatctacgagtacgacatacccttcgccaagcgctacctcatcgacaagggcctgattccgatggagggcgacgaggagcttacgatgctcgccttcgcgatcgcaaccctctatcacgagggcgaggagttcggaaccgggccgattctcatgataagctacgccgacgggagcgaggcgagggtgataacctggaagaagattgaccttccgtacgttgacgtcgtctcgaccgagaaggagatgattaagcgcttcctccgcgtcgtcagggagaaggaccccgacgtgctcatcacctacaacggcgacaacttcgacttcgcctacctgaagaagcgctgtgaggaactcggaataaagttcacactcggcagggacgggagcgagccgaagatacagcgaatgggcgaccgctttgccgttgaggtgaagggcaggattcacttcgacctctaccccgtcataaggcgcacgataaacctcccgacctacacccttgaggccgtttacgaggccgtctttggaaagcccaaggagaaggtttacgcagaggagatagcgcaggcctgggagagcggggagggccttgaaagggttgcaagatactcgatggaggacgctaaggtgacctacgagctgggaagggagttcttcccgatggaggcccagctttcgaggcttataggccagagcctctgggacgtctcgcgctcgagcaccggaaatttggtggaggcattcctcctgcggaaggcctacaagaggaacgagctcgccccaaacaagcccgacgagagggagctcgcgagacggcgcgggggctacgctggcgggtacgttaaggaaccagagcggggattgtgggacaacattgtgtatttagacttccgctcgtgggggccttcaatcatcataacccacaacgtctcgccggataccctcaaccgcgagggctgtaaagagtacgacgtcgcccctgaggttggacacaagttctgcaaggacttccccggcttcataccaagcctcctgggagatttgctcgaggaggcgagcaagatagagcggaagatgaaggcaacggttgacccgctggagaagaaactcctcgtgtacaggcagtggcttataaaaatcctcgccaacagcttctacggctactacggctacgccaaggcccggtggtactgcaaggagtgcgccgagagcgttacggcctggggaagggagtatatagaaatggttatccgggaactcgaagaaaaattcggttttaaagttctctatgccgatacagacggtctccatgctaccattcccggagcagacgctgaaacagtcaagaaaaaagcaaaggagttcttaaaatacattaatccaaaactgcccggcctgctcgaacttgagtacgagggcttctacgtgaggggcttcttcgtcacgaagaagaagtacgctgtgatagacgaggagggcaagataaccacgaggggtcttgagattgtgaggcgcgactggagcgagatagcgaaggagacccaggccagggtcttagaggcgatactcaagcacggtgacgtcgaggaggccgttaggatagtcaaggaagtgacggaaaagctgagcaagtatgaggtcccgcccgagaagctggtaatccacgagcagataacgcgcgatttgagggattacaaagccaccggcccgcacgttgccgttgcgaagaggctcgcggcgcgtggagtgaaaatccggcccggcacggtgataagctacatcgtcctaaagggctctggaaggataggcgacagggcgattccagctgatgagttcgacccgacgaagcaccgctacgatgcggaatactacatcgagaaccaggttctcccggcggtggagaggattctaaaagccttcggctatcggaaggaggatttgcgctaccagaagacgaagcaggtcggctcgggcgcgtggctgaaggtgaaggggaagaagggtaccgaagcttacgtagaacaaaaactcatctcagaagaggatctgaatagcgccgtcgaccatcatcatcatcatcattga

SEQ ID NO: 672 - protein, 802 aa, Artificial Sequence
  Description of Artificial Sequence:Thermococcus species 9degreesN-7 mutant DNA polymerase, 9degreesN mutant
MILDTDYITENGKPVIRVFKKENGEFKIEYDRTFEPYFYALLKDDSAIEDVKKVTAKRHGTVVKVKRAEKVQKKFLGRPIEVWKLYFNHPQDVPAIRDRIRAHPAVVDIYEYDIPFAKRYLIDKGLIPMEGDEELTMLAFAIATLYHEGEEFGTGPILMISYADGSEARVITWKKIDLPYVDVVSTEKEMIKRFLRVVREKDPDVLITYNGDNFDFAYLKKRCEELGIKFTLGRDGSEPKIQRMGDRFAVEVKGRIHFDLYPVIRRTINLPTYTLEAVYEAVFGKPKEKVYAEEIAQAWESGEGLERVARYSMEDAKVTYELGREFFPMEAQLSRLIGQSLWDVSRSSTGNLVEAFLLRKAYKRNELAPNKPDERELARRRGGYAGGYVKEPERGLWDNIVYLDFRSWGPSIIITHNVSPDTLNREGCKEYDVAPEVGHKFCKDFPGFIPSLLGDLLEEASKIERKMKATVDPLEKKLLVYRQWLIKILANSFYGYYGYAKARWYCKECAESVTAWGREYIEMVIRELEEKFGFKVLYADTDGLHATIPGADAETVKKKAKEFLKYINPKLPGLLELEYEGFYVRGFFVTKKKYAVIDEEGKITTRGLEIVRRDWSEIAKETQARVLEAILKHGDVEEAVRIVKEVTEKLSKYEVPPEKLVIHEQITRDLRDYKATGPHVAVAKRLAARGVKIRPGTVISYIVLKGSGRIGDRAIPADEFDPTKHRYDAEYYIENQVLPAVERILKAFGYRKEDLRYQKTKQVGSGAWLKVKGKKGTEAYVEQKLISEEDLNSAVDHHHHHH

SEQ ID NO: 673 - DNA, 2409 bp, Artificial Sequence
  Description of Artificial Sequence:Thermococcus species 9degreesN-7 mutant DNA polymerase, 9degreesN mutant
atgattctcgataccgactacatcaccgagaacgggaagcccgtgataagggtcttcaagaaggagaacggcgagtttaaaatcgagtacgacagaaccttcgagccctacttctacgcccttctgaaggacgattctgcgatagaggacgtcaagaaggtaaccgcaaagaggcacggaacggttgtcaaggtgaagcgcgccgagaaggtgcagaagaagttcctcggcaggccgatagaggtctggaagctctacttcaaccatcctcaggacgtcccggcgattcgagacaggatacgcgcccaccccgctgtcgttgacatctacgagtacgacatacccttcgccaagcgctacctcatcgacaagggcctgattccgatggagggcgacgaggagcttacgatgctcgccttcgcgatcgcaaccctctatcacgagggcgaggagttcggaaccgggccgattctcatgataagctacgccgacgggagcgaggcgagggtgataacctggaagaagattgaccttccgtacgttgacgtcgtctcgaccgagaaggagatgattaagcgcttcctccgcgtcgtcagggagaaggaccccgacgtgctcatcacctacaacggcgacaacttcgacttcgcctacctgaagaagcgctgtgaggaactcggaataaagttcacactcggcagggacgggagcgagccgaagatacagcgaatgggcgaccgctttgccgttgaggtgaagggcaggattcacttcgacctctaccccgtcataaggcgcacgataaacctcccgacctacacccttgaggccgtttacgaggccgtctttggaaagcccaaggagaaggtttacgcagaggagatagcgcaggcctgggagagcggggagggccttgaaagggttgcaagatactcgatggaggacgctaaggtgacctacgagctgggaagggagttcttcccgatggaggcccagctttcgaggcttataggccagagcctctgggacgtctcgcgctcgagcaccggaaatttggtggaggcattcctcctgcggaaggcctacaagaggaacgagctcgccccaaacaagcccgacgagagggagctcgcgagacggcgcgggggctacgctggcgggtacgttaaggaaccagagcggggattgtgggacaacattgtgtatttagacttccgctcgtggatgccttcaatcatcataacccacaacgtctcgccggataccctcaaccgcgagggctgtaaagagtacgacgtcgcccctgaggttggacacaagttctgcaaggacttccccggcttcataccaagcctcctgggagatttgctcgaggaggcgagcaagatagagcggaagatgaaggcaacggttgacccgctggagaagaaactcctcgtgtacaggcagtggcttataaaaatcctcgccaacagcttctacggctactacggctacgccaaggcccggtggtactgcaaggagtgcgccgagagcgttacggcctggggaagggagtatatagaaatggttatccgggaactcgaagaaaaattcggttttaaagttctctatgccgatacagacggtctccatgctaccattcccggagcagacgctgaaacagtcaagaaaaaagcaaaggagttcttaaaatacattaatccaaaactgcccggcctgctcgaacttgagtacgagggcttctacgtgaggggcttcttcgtcacgaagaagaagtacgctgtgatagacgaggagggcaagataaccacgaggggtcttgagattgtgaggcgcgactggagcgagatagcgaaggagacccaggccagggtcttagaggcgatactcaagcacggtgacgtcgaggaggccgttaggatagtcaaggaagtgacggaaaagctgagcaagtatgaggtcccgcccgagaagctggtaatccacgagcagataacgcgcgatttgagggattacaaagccaccggcccgcacgttgccgttgcgaagaggctcgcggcgcgtggagtgaaaatccggcccggcacggtgataagctacatcgtcctaaagggctctggaaggataggcgacagggcgattccagctgatgagttcgacccgacgaagcaccgctacgatgcggaatactacatcgagaaccaggttctcccggcggtggagaggattctaaaagccttcggctatcggaaggaggatttgcgctaccagaagacgaagcaggtcggctcgggcgcgtggctgaaggtgaaggggaagaagggtaccgaagcttacgtagaacaaaaactcatctcagaagaggatctgaatagcgccgtcgaccatcatcatcatcatcattga

SEQ ID NO: 674 - protein, 802 aa, Artificial Sequence
  Description of Artificial Sequence:Thermococcus species 9degreesN-7 mutant DNA polymerase, 9degreesN mutant
MILDTDYITENGKPVIRVFKKENGEFKIEYDRTFEPYFYALLKDDSAIEDVKKVTAKRHGTVVKVKRAEKVQKKFLGRPIEVWKLYFNHPQDVPAIRDRIRAHPAVVDIYEYDIPFAKRYLIDKGLIPMEGDEELTMLAFAIATLYHEGEEFGTGPILMISYADGSEARVITWKKIDLPYVDVVSTEKEMIKRFLRVVREKDPDVLITYNGDNFDFAYLKKRCEELGIKFTLGRDGSEPKIQRMGDRFAVEVKGRIHFDLYPVIRRTINLPTYTLEAVYEAVFGKPKEKVYAEEIAQAWESGEGLERVARYSMEDAKVTYELGREFFPMEAQLSRLIGQSLWDVSRSSTGNLVEAFLLRKAYKRNELAPNKPDERELARRRGGYAGGYVKEPERGLWDNIVYLDFRSWMPSIIITHNVSPDTLNREGCKEYDVAPEVGHKFCKDFPGFIPSLLGDLLEEASKIERKMKATVDPLEKKLLVYRQWLIKILANSFYGYYGYAKARWYCKECAESVTAWGREYIEMVIRELEEKFGFKVLYADTDGLHATIPGADAETVKKKAKEFLKYINPKLPGLLELEYEGFYVRGFFVTKKKYAVIDEEGKITTRGLEIVRRDWSEIAKETQARVLEAILKHGDVEEAVRIVKEVTEKLSKYEVPPEKLVIHEQITRDLRDYKATGPHVAVAKRLAARGVKIRPGTVISYIVLKGSGRIGDRAIPADEFDPTKHRYDAEYYIENQVLPAVERILKAFGYRKEDLRYQKTKQVGSGAWLKVKGKKGTEAYVEQKLISEEDLNSAVDHHHHHH

SEQ ID NO: 675 - DNA, 2409 bp, Artificial Sequence
  Description of Artificial Sequence:Thermococcus species 9degreesN-7 mutant DNA polymerase, 9degreesN mutant
atgattctcgataccgactacatcaccgagaacgggaagcccgtgataagggtcttcaagaaggagaacggcgagtttaaaatcgagtacgacagaaccttcgagccctacttctacgcccttctgaaggacgattctgcgatagaggacgtcaagaaggtaaccgcaaagaggcacggaacggttgtcaaggtgaagcgcgccgagaaggtgcagaagaagttcctcggcaggccgatagaggtctggaagctctacttcaaccatcctcaggacgtcccggcgattcgagacaggatacgcgcccaccccgctgtcgttgacatctacgagtacgacatacccttcgccaagcgctacctcatcgacaagggcctgattccgatggagggcgacgaggagcttacgatgctcgccttcgcgatcgcaaccctctatcacgagggcgaggagttcggaaccgggccgattctcatgataagctacgccgacgggagcgaggcgagggtgataacctggaagaagattgaccttccgtacgttgacgtcgtctcgaccgagaaggagatgattaagcgcttcctccgcgtcgtcagggagaaggaccccgacgtgctcatcacctacaacggcgacaacttcgacttcgcctacctgaagaagcgctgtgaggaactcggaataaagttcacactcggcagggacgggagcgagccgaagatacagcgaatgggcgaccgctttgccgttgaggtgaagggcaggattcacttcgacctctaccccgtcataaggcgcacgataaacctcccgacctacacccttgaggccgtttacgaggccgtctttggaaagcccaaggagaaggtttacgcagaggagatagcgcaggcctgggagagcggggagggccttgaaagggttgcaagatactcgatggaggacgctaaggtgacctacgagctgggaagggagttcttcccgatggaggcccagctttcgaggcttataggccagagcctctgggacgtctcgcgctcgagcaccggaaatttggtggaggcattcctcctgcggaaggcctacaagaggaacgagctcgccccaaacaagcccgacgagagggagctcgcgagacggcgcgggggctacgctggcgggtacgttaaggaaccagagcggggattgtgggacaacattgtgtatttagacttccgctcgtggatcccttcaatcatcataacccacaacgtctcgccggataccctcaaccgcgagggctgtaaagagtacgacgtcgcccctgaggttggacacaagttctgcaaggacttccccggcttcataccaagcctcctgggagatttgctcgaggaggcgagcaagatagagcggaagatgaaggcaacggttgacccgctggagaagaaactcctcgtgtacaggcagtggcttataaaaatcctcgccaacagcttctacggctactacggctacgccaaggcccggtggtactgcaaggagtgcgccgagagcgttacggcctggggaagggagtatatagaaatggttatccgggaactcgaagaaaaattcggttttaaagttctctatgccgatacagacggtctccatgctaccattcccggagcagacgctgaaacagtcaagaaaaaagcaaaggagttcttaaaatacattaatccaaaactgcccggcctgctcgaacttgagtacgagggcttctacgtgaggggcttcttcgtcacgaagaagaagtacgctgtgatagacgaggagggcaagataaccacgaggggtcttgagattgtgaggcgcgactggagcgagatagcgaaggagacccaggccagggtcttagaggcgatactcaagcacggtgacgtcgaggaggccgttaggatagtcaaggaagtgacggaaaagctgagcaagtatgaggtcccgcccgagaagctggtaatccacgagcagataacgcgcgatttgagggattacaaagccaccggcccgcacgttgccgttgcgaagaggctcgcggcgcgtggagtgaaaatccggcccggcacggtgataagctacatcgtcctaaagggctctggaaggataggcgacagggcgattccagctgatgagttcgacccgacgaagcaccgctacgatgcggaatactacatcgagaaccaggttctcccggcggtggagaggattctaaaagccttcggctatcggaaggaggatttgcgctaccagaagacgaagcaggtcggctcgggcgcgtggctgaaggtgaaggggaagaagggtaccgaagcttacgtagaacaaaaactcatctcagaagaggatctgaatagcgccgtcgaccatcatcatcatcatcattga

SEQ ID NO: 676 - protein, 802 aa, Artificial Sequence
  Description of Artificial Sequence:Thermococcus species 9degreesN-7 mutant DNA polymerase, 9degreesN mutant
MILDTDYITENGKPVIRVFKKENGEFKIEYDRTFEPYFYALLKDDSAIEDVKKVTAKRHGTVVKVKRAEKVQKKFLGRPIEVWKLYFNHPQDVPAIRDRIRAHPAVVDIYEYDIPFAKRYLIDKGLIPMEGDEELTMLAFAIATLYHEGEEFGTGPILMISYADGSEARVITWKKIDLPYVDVVSTEKEMIKRFLRVVREKDPDVLITYNGDNFDFAYLKKRCEELGIKFTLGRDGSEPKIQRMGDRFAVEVKGRIHFDLYPVIRRTINLPTYTLEAVYEAVFGKPKEKVYAEEIAQAWESGEGLERVARYSMEDAKVTYELGREFFPMEAQLSRLIGQSLWDVSRSSTGNLVEAFLLRKAYKRNELAPNKPDERELARRRGGYAGGYVKEPERGLWDNIVYLDFRSWIPSIIITHNVSPDTLNREGCKEYDVAPEVGHKFCKDFPGFIPSLLGDLLEEASKIERKMKATVDPLEKKLLVYRQWLIKILANSFYGYYGYAKARWYCKECAESVTAWGREYIEMVIRELEEKFGFKVLYADTDGLHATIPGADAETVKKKAKEFLKYINPKLPGLLELEYEGFYVRGFFVTKKKYAVIDEEGKITTRGLEIVRRDWSEIAKETQARVLEAILKHGDVEEAVRIVKEVTEKLSKYEVPPEKLVIHEQITRDLRDYKATGPHVAVAKRLAARGVKIRPGTVISYIVLKGSGRIGDRAIPADEFDPTKHRYDAEYYIENQVLPAVERILKAFGYRKEDLRYQKTKQVGSGAWLKVKGKKGTEAYVEQKLISEEDLNSAVDHHHHHH

SEQ ID NO: 677 - DNA, 2409 bp, Artificial Sequence
  Description of Artificial Sequence:Thermococcus species 9degreesN-7 mutant DNA polymerase, 9degreesN mutant
atgattctcgataccgactacatcaccgagaacgggaagcccgtgataagggtcttcaagaaggagaacggcgagtttaaaatcgagtacgacagaaccttcgagccctacttctacgcccttctgaaggacgattctgcgatagaggacgtcaagaaggtaaccgcaaagaggcacggaacggttgtcaaggtgaagcgcgccgagaaggtgcagaagaagttcctcggcaggccgatagaggtctggaagctctacttcaaccatcctcaggacgtcccggcgattcgagacaggatacgcgcccaccccgctgtcgttgacatctacgagtacgacatacccttcgccaagcgctacctcatcgacaagggcctgattccgatggagggcgacgaggagcttacgatgctcgccttcgcgatcgcaaccctctatcacgagggcgaggagttcggaaccgggccgattctcatgataagctacgccgacgggagcgaggcgagggtgataacctggaagaagattgaccttccgtacgttgacgtcgtctcgaccgagaaggagatgattaagcgcttcctccgcgtcgtcagggagaaggaccccgacgtgctcatcacctacaacggcgacaacttcgacttcgcctacctgaagaagcgctgtgaggaactcggaataaagttcacactcggcagggacgggagcgagccgaagatacagcgaatgggcgaccgctttgccgttgaggtgaagggcaggattcacttcgacctctaccccgtcataaggcgcacgataaacctcccgacctacacccttgaggccgtttacgaggccgtctttggaaagcccaaggagaaggtttacgcagaggagatagcgcaggcctgggagagcggggagggccttgaaagggttgcaagatactcgatggaggacgctaaggtgacctacgagctgggaagggagttcttcccgatggaggcccagctttcgaggcttataggccagagcctctgggacgtctcgcgctcgagcaccggaaatttggtggaggcattcctcctgcggaaggcctacaagaggaacgagctcgccccaaacaagcccgacgagagggagctcgcgagacggcgcgggggctacgctggcgggtacgttaaggaaccagagcggggattgtgggacaacattgtgtatttagacttccgctcgtggtttccttcaatcatcataacccacaacgtctcgccggataccctcaaccgcgagggctgtaaagagtacgacgtcgcccctgaggttggacacaagttctgcaaggacttccccggcttcataccaagcctcctgggagatttgctcgaggaggcgagcaagatagagcggaagatgaaggcaacggttgacccgctggagaagaaactcctcgtgtacaggcagtggcttataaaaatcctcgccaacagcttctacggctactacggctacgccaaggcccggtggtactgcaaggagtgcgccgagagcgttacggcctggggaagggagtatatagaaatggttatccgggaactcgaagaaaaattcggttttaaagttctctatgccgatacagacggtctccatgctaccattcccggagcagacgctgaaacagtcaagaaaaaagcaaaggagttcttaaaatacattaatccaaaactgcccggcctgctcgaacttgagtacgagggcttctacgtgaggggcttcttcgtcacgaagaagaagtacgctgtgatagacgaggagggcaagataaccacgaggggtcttgagattgtgaggcgcgactggagcgagatagcgaaggagacccaggccagggtcttagaggcgatactcaagcacggtgacgtcgaggaggccgttaggatagtcaaggaagtgacggaaaagctgagcaagtatgaggtcccgcccgagaagctggtaatccacgagcagataacgcgcgatttgagggattacaaagccaccggcccgcacgttgccgttgcgaagaggctcgcggcgcgtggagtgaaaatccggcccggcacggtgataagctacatcgtcctaaagggctctggaaggataggcgacagggcgattccagctgatgagttcgacccgacgaagcaccgctacgatgcggaatactacatcgagaaccaggttctcccggcggtggagaggattctaaaagccttcggctatcggaaggaggatttgcgctaccagaagacgaagcaggtcggctcgggcgcgtggctgaaggtgaaggggaagaagggtaccgaagcttacgtagaacaaaaactcatctcagaagaggatctgaatagcgccgtcgaccatcatcatcatcatcattga

SEQ ID NO: 678 - protein, 802 aa, Artificial Sequence
  Description of Artificial Sequence:Thermococcus species 9degreesN-7 mutant DNA polymerase, 9degreesN mutant
MILDTDYITENGKPVIRVFKKENGEFKIEYDRTFEPYFYALLKDDSAIEDVKKVTAKRHGTVVKVKRAEKVQKKFLGRPIEVWKLYFNHPQDVPAIRDRIRAHPAVVDIYEYDIPFAKRYLIDKGLIPMEGDEELTMLAFAIATLYHEGEEFGTGPILMISYADGSEARVITWKKIDLPYVDVVSTEKEMIKRFLRVVREKDPDVLITYNGDNFDFAYLKKRCEELGIKFTLGRDGSEPKIQRMGDRFAVEVKGRIHFDLYPVIRRTINLPTYTLEAVYEAVFGKPKEKVYAEEIAQAWESGEGLERVARYSMEDAKVTYELGREFFPMEAQLSRLIGQSLWDVSRSSTGNLVEAFLLRKAYKRNELAPNKPDERELARRRGGYAGGYVKEPERGLWDNIVYLDFRSWFPSIIITHNVSPDTLNREGCKEYDVAPEVGHKFCKDFPGFIPSLLGDLLEEASKIERKMKATVDPLEKKLLVYRQWLIKILANSFYGYYGYAKARWYCKECAESVTAWGREYIEMVIRELEEKFGFKVLYADTDGLHATIPGADAETVKKKAKEFLKYINPKLPGLLELEYEGFYVRGFFVTKKKYAVIDEEGKITTRGLEIVRRDWSEIAKETQARVLEAILKHGDVEEAVRIVKEVTEKLSKYEVPPEKLVIHEQITRDLRDYKATGPHVAVAKRLAARGVKIRPGTVISYIVLKGSGRIGDRAIPADEFDPTKHRYDAEYYIENQVLPAVERILKAFGYRKEDLRYQKTKQVGSGAWLKVKGKKGTEAYVEQKLISEEDLNSAVDHHHHHH

SEQ ID NO: 679 - DNA, 2409 bp, Artificial Sequence
  Description of Artificial Sequence:Thermococcus species 9degreesN-7 mutant DNA polymerase, 9degreesN mutant
atgattctcgataccgactacatcaccgagaacgggaagcccgtgataagggtcttcaagaaggagaacggcgagtttaaaatcgagtacgacagaaccttcgagccctacttctacgcccttctgaaggacgattctgcgatagaggacgtcaagaaggtaaccgcaaagaggcacggaacggttgtcaaggtgaagcgcgccgagaaggtgcagaagaagttcctcggcaggccgatagaggtctggaagctctacttcaaccatcctcaggacgtcccggcgattcgagacaggatacgcgcccaccccgctgtcgttgacatctacgagtacgacatacccttcgccaagcgctacctcatcgacaagggcctgattccgatggagggcgacgaggagcttacgatgctcgccttcgcgatcgcaaccctctatcacgagggcgaggagttcggaaccgggccgattctcatgataagctacgccgacgggagcgaggcgagggtgataacctggaagaagattgaccttccgtacgttgacgtcgtctcgaccgagaaggagatgattaagcgcttcctccgcgtcgtcagggagaaggaccccgacgtgctcatcacctacaacggcgacaacttcgacttcgcctacctgaagaagcgctgtgaggaactcggaataaagttcacactcggcagggacgggagcgagccgaagatacagcgaatgggcgaccgctttgccgttgaggtgaagggcaggattcacttcgacctctaccccgtcataaggcgcacgataaacctcccgacctacacccttgaggccgtttacgaggccgtctttggaaagcccaaggagaaggtttacgcagaggagatagcgcaggcctgggagagcggggagggccttgaaagggttgcaagatactcgatggaggacgctaaggtgacctacgagctgggaagggagttcttcccgatggaggcccagctttcgaggcttataggccagagcctctgggacgtctcgcgctcgagcaccggaaatttggtggaggcattcctcctgcggaaggcctacaagaggaacgagctcgccccaaacaagcccgacgagagggagctcgcgagacggcgcgggggctacgctggcgggtacgttaaggaaccagagcggggattgtgggacaacattgtgtatttagacttccgctcgtgggacccttcaatcatcataacccacaacgtctcgccggataccctcaaccgcgagggctgtaaagagtacgacgtcgcccctgaggttggacacaagttctgcaaggacttccccggcttcataccaagcctcctgggagatttgctcgaggaggcgagcaagatagagcggaagatgaaggcaacggttgacccgctggagaagaaactcctcgtgtacaggcagtggcttataaaaatcctcgccaacagcttctacggctactacggctacgccaaggcccggtggtactgcaaggagtgcgccgagagcgttacggcctggggaagggagtatatagaaatggttatccgggaactcgaagaaaaattcggttttaaagttctctatgccgatacagacggtctccatgctaccattcccggagcagacgctgaaacagtcaagaaaaaagcaaaggagttcttaaaatacattaatccaaaactgcccggcctgctcgaacttgagtacgagggcttctacgtgaggggcttcttcgtcacgaagaagaagtacgctgtgatagacgaggagggcaagataaccacgaggggtcttgagattgtgaggcgcgactggagcgagatagcgaaggagacccaggccagggtcttagaggcgatactcaagcacggtgacgtcgaggaggccgttaggatagtcaaggaagtgacggaaaagctgagcaagtatgaggtcccgcccgagaagctggtaatccacgagcagataacgcgcgatttgagggattacaaagccaccggcccgcacgttgccgttgcgaagaggctcgcggcgcgtggagtgaaaatccggcccggcacggtgataagctacatcgtcctaaagggctctggaaggataggcgacagggcgattccagctgatgagttcgacccgacgaagcaccgctacgatgcggaatactacatcgagaaccaggttctcccggcggtggagaggattctaaaagccttcggctatcggaaggaggatttgcgctaccagaagacgaagcaggtcggctcgggcgcgtggctgaaggtgaaggggaagaagggtaccgaagcttacgtagaacaaaaactcatctcagaagaggatctgaatagcgccgtcgaccatcatcatcatcatcattga

SEQ ID NO: 680 - protein, 802 aa, Artificial Sequence
  Description of Artificial Sequence:Thermococcus species 9degreesN-7 mutant DNA polymerase, 9degreesN mutant
MILDTDYITENGKPVIRVFKKENGEFKIEYDRTFEPYFYALLKDDSAIEDVKKVTAKRHGTVVKVKRAEKVQKKFLGRPIEVWKLYFNHPQDVPAIRDRIRAHPAVVDIYEYDIPFAKRYLIDKGLIPMEGDEELTMLAFAIATLYHEGEEFGTGPILMISYADGSEARVITWKKIDLPYVDVVSTEKEMIKRFLRVVREKDPDVLITYNGDNFDFAYLKKRCEELGIKFTLGRDGSEPKIQRMGDRFAVEVKGRIHFDLYPVIRRTINLPTYTLEAVYEAVFGKPKEKVYAEEIAQAWESGEGLERVARYSMEDAKVTYELGREFFPMEAQLSRLIGQSLWDVSRSSTGNLVEAFLLRKAYKRNELAPNKPDERELARRRGGYAGGYVKEPERGLWDNIVYLDFRSWDPSIIITHNVSPDTLNREGCKEYDVAPEVGHKFCKDFPGFIPSLLGDLLEEASKIERKMKATVDPLEKKLLVYRQWLIKILANSFYGYYGYAKARWYCKECAESVTAWGREYIEMVIRELEEKFGFKVLYADTDGLHATIPGADAETVKKKAKEFLKYINPKLPGLLELEYEGFYVRGFFVTKKKYAVIDEEGKITTRGLEIVRRDWSEIAKETQARVLEAILKHGDVEEAVRIVKEVTEKLSKYEVPPEKLVIHEQITRDLRDYKATGPHVAVAKRLAARGVKIRPGTVISYIVLKGSGRIGDRAIPADEFDPTKHRYDAEYYIENQVLPAVERILKAFGYRKEDLRYQKTKQVGSGAWLKVKGKKGTEAYVEQKLISEEDLNSAVDHHHHHH

SEQ ID NO: 681 - DNA, 2409 bp, Artificial Sequence
  Description of Artificial Sequence:Thermococcus species 9degreesN-7 mutant DNA polymerase, 9degreesN mutant
atgattctcgataccgactacatcaccgagaacgggaagcccgtgataagggtcttcaagaaggagaacggcgagtttaaaatcgagtacgacagaaccttcgagccctacttctacgcccttctgaaggacgattctgcgatagaggacgtcaagaaggtaaccgcaaagaggcacggaacggttgtcaaggtgaagcgcgccgagaaggtgcagaagaagttcctcggcaggccgatagaggtctggaagctctacttcaaccatcctcaggacgtcccggcgattcgagacaggatacgcgcccaccccgctgtcgttgacatctacgagtacgacatacccttcgccaagcgctacctcatcgacaagggcctgattccgatggagggcgacgaggagcttacgatgctcgccttcgcgatcgcaaccctctatcacgagggcgaggagttcggaaccgggccgattctcatgataagctacgccgacgggagcgaggcgagggtgataacctggaagaagattgaccttccgtacgttgacgtcgtctcgaccgagaaggagatgattaagcgcttcctccgcgtcgtcagggagaaggaccccgacgtgctcatcacctacaacggcgacaacttcgacttcgcctacctgaagaagcgctgtgaggaactcggaataaagttcacactcggcagggacgggagcgagccgaagatacagcgaatgggcgaccgctttgccgttgaggtgaagggcaggattcacttcgacctctaccccgtcataaggcgcacgataaacctcccgacctacacccttgaggccgtttacgaggccgtctttggaaagcccaaggagaaggtttacgcagaggagatagcgcaggcctgggagagcggggagggccttgaaagggttgcaagatactcgatggaggacgctaaggtgacctacgagctgggaagggagttcttcccgatggaggcccagctttcgaggcttataggccagagcctctgggacgtctcgcgctcgagcaccggaaatttggtggaggcattcctcctgcggaaggcctacaagaggaacgagctcgccccaaacaagcccgacgagagggagctcgcgagacggcgcgggggctacgctggcgggtacgttaaggaaccagagcggggattgtgggacaacattgtgtatttagacttccgctcgtggtatccttcaatcatcataacccacaacgtctcgccggataccctcaaccgcgagggctgtaaagagtacgacgtcgcccctgaggttggacacaagttctgcaaggacttccccggcttcataccaagcctcctgggagatttgctcgaggaggcgagcaagatagagcggaagatgaaggcaacggttgacccgctggagaagaaactcctcgtgtacaggcagtggcttataaaaatcctcgccaacagcttcatcggctactacggctacgccaaggcccggtggtactgcaaggagtgcgccgagagcgttacggcctggggaagggagtatatagaaatggttatccgggaactcgaagaaaaattcggttttaaagttctctatgccgatacagacggtctccatgctaccattcccggagcagacgctgaaacagtcaagaaaaaagcaaaggagttcttaaaatacattaatccaaaactgcccggcctgctcgaacttgagtacgagggcttctacgtgaggggcttcttcgtcacgaagaagaagtacgctgtgatagacgaggagggcaagataaccacgaggggtcttgagattgtgaggcgcgactggagcgagatagcgaaggagacccaggccagggtcttagaggcgatactcaagcacggtgacgtcgaggaggccgttaggatagtcaaggaagtgacggaaaagctgagcaagtatgaggtcccgcccgagaagctggtaatccacgagcagataacgcgcgatttgagggattacaaagccaccggcccgcacgttgccgttgcgaagaggctcgcggcgcgtggagtgaaaatccggcccggcacggtgataagctacatcgtcctaaagggctctggaaggataggcgacagggcgattccagctgatgagttcgacccgacgaagcaccgctacgatgcggaatactacatcgagaaccaggttctcccggcggtggagaggattctaaaagccttcggctatcggaaggaggatttgcgctaccagaagacgaagcaggtcggctcgggcgcgtggctgaaggtgaaggggaagaagggtaccgaagcttacgtagaacaaaaactcatctcagaagaggatctgaatagcgccgtcgaccatcatcatcatcatcattga

SEQ ID NO: 682 - protein, 802 aa, Artificial Sequence
  Description of Artificial Sequence:Thermococcus species 9degreesN-7 mutant DNA polymerase, 9degreesN mutant
MILDTDYITENGKPVIRVFKKENGEFKIEYDRTFEPYFYALLKDDSAIEDVKKVTAKRHGTVVKVKRAEKVQKKFLGRPIEVWKLYFNHPQDVPAIRDRIRAHPAVVDIYEYDIPFAKRYLIDKGLIPMEGDEELTMLAFAIATLYHEGEEFGTGPILMISYADGSEARVITWKKIDLPYVDVVSTEKEMIKRFLRVVREKDPDVLITYNGDNFDFAYLKKRCEELGIKFTLGRDGSEPKIQRMGDRFAVEVKGRIHFDLYPVIRRTINLPTYTLEAVYEAVFGKPKEKVYAEEIAQAWESGEGLERVARYSMEDAKVTYELGREFFPMEAQLSRLIGQSLWDVSRSSTGNLVEAFLLRKAYKRNELAPNKPDERELARRRGGYAGGYVKEPERGLWDNIVYLDFRSWYPSIIITHNVSPDTLNREGCKEYDVAPEVGHKFCKDFPGFIPSLLGDLLEEASKIERKMKATVDPLEKKLLVYRQWLIKILANSFIGYYGYAKARWYCKECAESVTAWGREYIEMVIRELEEKFGFKVLYADTDGLHATIPGADAETVKKKAKEFLKYINPKLPGLLELEYEGFYVRGFFVTKKKYAVIDEEGKITTRGLEIVRRDWSEIAKETQARVLEAILKHGDVEEAVRIVKEVTEKLSKYEVPPEKLVIHEQITRDLRDYKATGPHVAVAKRLAARGVKIRPGTVISYIVLKGSGRIGDRAIPADEFDPTKHRYDAEYYIENQVLPAVERILKAFGYRKEDLRYQKTKQVGSGAWLKVKGKKGTEAYVEQKLISEEDLNSAVDHHHHHH

SEQ ID NO: 683 - DNA, 2409 bp, Artificial Sequence
  Description of Artificial Sequence:Thermococcus species 9degreesN-7 mutant DNA polymerase, 9degreesN mutant
atgattctcgataccgactacatcaccgagaacgggaagcccgtgataagggtcttcaagaaggagaacggcgagtttaaaatcgagtacgacagaaccttcgagccctacttctacgcccttctgaaggacgattctgcgatagaggacgtcaagaaggtaaccgcaaagaggcacggaacggttgtcaaggtgaagcgcgccgagaaggtgcagaagaagttcctcggcaggccgatagaggtctggaagctctacttcaaccatcctcaggacgtcccggcgattcgagacaggatacgcgcccaccccgctgtcgttgacatctacgagtacgacatacccttcgccaagcgctacctcatcgacaagggcctgattccgatggagggcgacgaggagcttacgatgctcgccttcgcgatcgcaaccctctatcacgagggcgaggagttcggaaccgggccgattctcatgataagctacgccgacgggagcgaggcgagggtgataacctggaagaagattgaccttccgtacgttgacgtcgtctcgaccgagaaggagatgattaagcgcttcctccgcgtcgtcagggagaaggaccccgacgtgctcatcacctacaacggcgacaacttcgacttcgcctacctgaagaagcgctgtgaggaactcggaataaagttcacactcggcagggacgggagcgagccgaagatacagcgaatgggcgaccgctttgccgttgaggtgaagggcaggattcacttcgacctctaccccgtcataaggcgcacgataaacctcccgacctacacccttgaggccgtttacgaggccgtctttggaaagcccaaggagaaggtttacgcagaggagatagcgcaggcctgggagagcggggagggccttgaaagggttgcaagatactcgatggaggacgctaaggtgacctacgagctgggaagggagttcttcccgatggaggcccagctttcgaggcttataggccagagcctctgggacgtctcgcgctcgagcaccggaaatttggtggaggcattcctcctgcggaaggcctacaagaggaacgagctcgccccaaacaagcccgacgagagggagctcgcgagacggcgcgggggctacgctggcgggtacgttaaggaaccagagcggggattgtgggacaacattgtgtatttagacttccgctcgtggtatccttcaatcatcataacccacaacgtctcgccggataccctcaaccgcgagggctgtaaagagtacgacgtcgcccctgaggttggacacaagttctgcaaggacttccccggcttcataccaagcctcctgggagatttgctcgaggaggcgagcaagatagagcggaagatgaaggcaacggttgacccgctggagaagaaactcctcgtgtacaggcagtggcttataaaaatcctcgccaacagcttctggggctactacggctacgccaaggcccggtggtactgcaaggagtgcgccgagagcgttacggcctggggaagggagtatatagaaatggttatccgggaactcgaagaaaaattcggttttaaagttctctatgccgatacagacggtctccatgctaccattcccggagcagacgctgaaacagtcaagaaaaaagcaaaggagttcttaaaatacattaatccaaaactgcccggcctgctcgaacttgagtacgagggcttctacgtgaggggcttcttcgtcacgaagaagaagtacgctgtgatagacgaggagggcaagataaccacgaggggtcttgagattgtgaggcgcgactggagcgagatagcgaaggagacccaggccagggtcttagaggcgatactcaagcacggtgacgtcgaggaggccgttaggatagtcaaggaagtgacggaaaagctgagcaagtatgaggtcccgcccgagaagctggtaatccacgagcagataacgcgcgatttgagggattacaaagccaccggcccgcacgttgccgttgcgaagaggctcgcggcgcgtggagtgaaaatccggcccggcacggtgataagctacatcgtcctaaagggctctggaaggataggcgacagggcgattccagctgatgagttcgacccgacgaagcaccgctacgatgcggaatactacatcgagaaccaggttctcccggcggtggagaggattctaaaagccttcggctatcggaaggaggatttgcgctaccagaagacgaagcaggtcggctcgggcgcgtggctgaaggtgaaggggaagaagggtaccgaagcttacgtagaacaaaaactcatctcagaagaggatctgaatagcgccgtcgaccatcatcatcatcatcattga

SEQ ID NO: 684 - protein, 802 aa, Artificial Sequence
  Description of Artificial Sequence:Thermococcus species 9degreesN-7 mutant DNA polymerase, 9degreesN mutant
MILDTDYITENGKPVIRVFKKENGEFKIEYDRTFEPYFYALLKDDSAIEDVKKVTAKRHGTVVKVKRAEKVQKKFLGRPIEVWKLYFNHPQDVPAIRDRIRAHPAVVDIYEYDIPFAKRYLIDKGLIPMEGDEELTMLAFAIATLYHEGEEFGTGPILMISYADGSEARVITWKKIDLPYVDVVSTEKEMIKRFLRVVREKDPDVLITYNGDNFDFAYLKKRCEELGIKFTLGRDGSEPKIQRMGDRFAVEVKGRIHFDLYPVIRRTINLPTYTLEAVYEAVFGKPKEKVYAEEIAQAWESGEGLERVARYSMEDAKVTYELGREFFPMEAQLSRLIGQSLWDVSRSSTGNLVEAFLLRKAYKRNELAPNKPDERELARRRGGYAGGYVKEPERGLWDNIVYLDFRSWYPSIIITHNVSPDTLNREGCKEYDVAPEVGHKFCKDFPGFIPSLLGDLLEEASKIERKMKATVDPLEKKLLVYRQWLIKILANSFWGYYGYAKARWYCKECAESVTAWGREYIEMVIRELEEKFGFKVLYADTDGLHATIPGADAETVKKKAKEFLKYINPKLPGLLELEYEGFYVRGFFVTKKKYAVIDEEGKITTRGLEIVRRDWSEIAKETQARVLEAILKHGDVEEAVRIVKEVTEKLSKYEVPPEKLVIHEQITRDLRDYKATGPHVAVAKRLAARGVKIRPGTVISYIVLKGSGRIGDRAIPADEFDPTKHRYDAEYYIENQVLPAVERILKAFGYRKEDLRYQKTKQVGSGAWLKVKGKKGTEAYVEQKLISEEDLNSAVDHHHHHH

SEQ ID NO: 685 - DNA, 2409 bp, Artificial Sequence
  Description of Artificial Sequence:Thermococcus species 9degreesN-7 mutant DNA polymerase, 9degreesN mutant
atgattctcgataccgactacatcaccgagaacgggaagcccgtgataagggtcttcaagaaggagaacggcgagtttaaaatcgagtacgacagaaccttcgagccctacttctacgcccttctgaaggacgattctgcgatagaggacgtcaagaaggtaaccgcaaagaggcacggaacggttgtcaaggtgaagcgcgccgagaaggtgcagaagaagttcctcggcaggccgatagaggtctggaagctctacttcaaccatcctcaggacgtcccggcgattcgagacaggatacgcgcccaccccgctgtcgttgacatctacgagtacgacatacccttcgccaagcgctacctcatcgacaagggcctgattccgatggagggcgacgaggagcttacgatgctcgccttcgcgatcgcaaccctctatcacgagggcgaggagttcggaaccgggccgattctcatgataagctacgccgacgggagcgaggcgagggtgataacctggaagaagattgaccttccgtacgttgacgtcgtctcgaccgagaaggagatgattaagcgcttcctccgcgtcgtcagggagaaggaccccgacgtgctcatcacctacaacggcgacaacttcgacttcgcctacctgaagaagcgctgtgaggaactcggaataaagttcacactcggcagggacgggagcgagccgaagatacagcgaatgggcgaccgctttgccgttgaggtgaagggcaggattcacttcgacctctaccccgtcataaggcgcacgataaacctcccgacctacacccttgaggccgtttacgaggccgtctttggaaagcccaaggagaaggtttacgcagaggagatagcgcaggcctgggagagcggggagggccttgaaagggttgcaagatactcgatggaggacgctaaggtgacctacgagctgggaagggagttcttcccgatggaggcccagctttcgaggcttataggccagagcctctgggacgtctcgcgctcgagcaccggaaatttggtggaggcattcctcctgcggaaggcctacaagaggaacgagctcgccccaaacaagcccgacgagagggagctcgcgagacggcgcgggggctacgctggcgggtacgttaaggaaccagagcggggattgtgggacaacattgtgtatttagacttccgctcgtggtatccttcaatcatcataacccacaacgtctcgccggataccctcaaccgcgagggctgtaaagagtacgacgtcgcccctgaggttggacacaagttctgcaaggacttccccggcttcataccaagcctcctgggagatttgctcgaggaggcgagcaagatagagcggaagatgaaggcaacggttgacccgctggagaagaaactcctcgtgtacaggcagtggcttataaaaatcctcgccaacagcttccgtggctactacggctacgccaaggcccggtggtactgcaaggagtgcgccgagagcgttacggcctggggaagggagtatatagaaatggttatccgggaactcgaagaaaaattcggttttaaagttctctatgccgatacagacggtctccatgctaccattcccggagcagacgctgaaacagtcaagaaaaaagcaaaggagttcttaaaatacattaatccaaaactgcccggcctgctcgaacttgagtacgagggcttctacgtgaggggcttcttcgtcacgaagaagaagtacgctgtgatagacgaggagggcaagataaccacgaggggtcttgagattgtgaggcgcgactggagcgagatagcgaaggagacccaggccagggtcttagaggcgatactcaagcacggtgacgtcgaggaggccgttaggatagtcaaggaagtgacggaaaagctgagcaagtatgaggtcccgcccgagaagctggtaatccacgagcagataacgcgcgatttgagggattacaaagccaccggcccgcacgttgccgttgcgaagaggctcgcggcgcgtggagtgaaaatccggcccggcacggtgataagctacatcgtcctaaagggctctggaaggataggcgacagggcgattccagctgatgagttcgacccgacgaagcaccgctacgatgcggaatactacatcgagaaccaggttctcccggcggtggagaggattctaaaagccttcggctatcggaaggaggatttgcgctaccagaagacgaagcaggtcggctcgggcgcgtggctgaaggtgaaggggaagaagggtaccgaagcttacgtagaacaaaaactcatctcagaagaggatctgaatagcgccgtcgaccatcatcatcatcatcattga

SEQ ID NO: 686 - protein, 802 aa, Artificial Sequence
  Description of Artificial Sequence:Thermococcus species 9degreesN-7 mutant DNA polymerase, 9degreesN mutant
MILDTDYITENGKPVIRVFKKENGEFKIEYDRTFEPYFYALLKDDSAIEDVKKVTAKRHGTVVKVKRAEKVQKKFLGRPIEVWKLYFNHPQDVPAIRDRIRAHPAVVDIYEYDIPFAKRYLIDKGLIPMEGDEELTMLAFAIATLYHEGEEFGTGPILMISYADGSEARVITWKKIDLPYVDVVSTEKEMIKRFLRVVREKDPDVLITYNGDNFDFAYLKKRCEELGIKFTLGRDGSEPKIQRMGDRFAVEVKGRIHFDLYPVIRRTINLPTYTLEAVYEAVFGKPKEKVYAEEIAQAWESGEGLERVARYSMEDAKVTYELGREFFPMEAQLSRLIGQSLWDVSRSSTGNLVEAFLLRKAYKRNELAPNKPDERELARRRGGYAGGYVKEPERGLWDNIVYLDFRSWYPSIIITHNVSPDTLNREGCKEYDVAPEVGHKFCKDFPGFIPSLLGDLLEEASKIERKMKATVDPLEKKLLVYRQWLIKILANSFRGYYGYAKARWYCKECAESVTAWGREYIEMVIRELEEKFGFKVLYADTDGLHATIPGADAETVKKKAKEFLKYINPKLPGLLELEYEGFYVRGFFVTKKKYAVIDEEGKITTRGLEIVRRDWSEIAKETQARVLEAILKHGDVEEAVRIVKEVTEKLSKYEVPPEKLVIHEQITRDLRDYKATGPHVAVAKRLAARGVKIRPGTVISYIVLKGSGRIGDRAIPADEFDPTKHRYDAEYYIENQVLPAVERILKAFGYRKEDLRYQKTKQVGSGAWLKVKGKKGTEAYVEQKLISEEDLNSAVDHHHHHH

SEQ ID NO: 687 - DNA, 2409 bp, Artificial Sequence
  Description of Artificial Sequence:Thermococcus species 9degreesN-7 mutant DNA polymerase, 9degreesN mutant
atgattctcgataccgactacatcaccgagaacgggaagcccgtgataagggtcttcaagaaggagaacggcgagtttaaaatcgagtacgacagaaccttcgagccctacttctacgcccttctgaaggacgattctgcgatagaggacgtcaagaaggtaaccgcaaagaggcacggaacggttgtcaaggtgaagcgcgccgagaaggtgcagaagaagttcctcggcaggccgatagaggtctggaagctctacttcaaccatcctcaggacgtcccggcgattcgagacaggatacgcgcccaccccgctgtcgttgacatctacgagtacgacatacccttcgccaagcgctacctcatcgacaagggcctgattccgatggagggcgacgaggagcttacgatgctcgccttcgcgatcgcaaccctctatcacgagggcgaggagttcggaaccgggccgattctcatgataagctacgccgacgggagcgaggcgagggtgataacctggaagaagattgaccttccgtacgttgacgtcgtctcgaccgagaaggagatgattaagcgcttcctccgcgtcgtcagggagaaggaccccgacgtgctcatcacctacaacggcgacaacttcgacttcgcctacctgaagaagcgctgtgaggaactcggaataaagttcacactcggcagggacgggagcgagccgaagatacagcgaatgggcgaccgctttgccgttgaggtgaagggcaggattcacttcgacctctaccccgtcataaggcgcacgataaacctcccgacctacacccttgaggccgtttacgaggccgtctttggaaagcccaaggagaaggtttacgcagaggagatagcgcaggcctgggagagcggggagggccttgaaagggttgcaagatactcgatggaggacgctaaggtgacctacgagctgggaagggagttcttcccgatggaggcccagctttcgaggcttataggccagagcctctgggacgtctcgcgctcgagcaccggaaatttggtggaggcattcctcctgcggaaggcctacaagaggaacgagctcgccccaaacaagcccgacgagagggagctcgcgagacggcgcgggggctacgctggcgggtacgttaaggaaccagagcggggattgtgggacaacattgtgtatttagacttccgctcgtggtatccttcaatcatcataacccacaacgtctcgccggataccctcaaccgcgagggctgtaaagagtacgacgtcgcccctgaggttggacacaagttctgcaaggacttccccggcttcataccaagcctcctgggagatttgctcgaggaggcgagcaagatagagcggaagatgaaggcaacggttgacccgctggagaagaaactcctcgtgtacaggcagtggcttataaaaatcctcgccaacagcttccccggctactacggctacgccaaggcccggtggtactgcaaggagtgcgccgagagcgttacggcctggggaagggagtatatagaaatggttatccgggaactcgaagaaaaattcggttttaaagttctctatgccgatacagacggtctccatgctaccattcccggagcagacgctgaaacagtcaagaaaaaagcaaaggagttcttaaaatacattaatccaaaactgcccggcctgctcgaacttgagtacgagggcttctacgtgaggggcttcttcgtcacgaagaagaagtacgctgtgatagacgaggagggcaagataaccacgaggggtcttgagattgtgaggcgcgactggagcgagatagcgaaggagacccaggccagggtcttagaggcgatactcaagcacggtgacgtcgaggaggccgttaggatagtcaaggaagtgacggaaaagctgagcaagtatgaggtcccgcccgagaagctggtaatccacgagcagataacgcgcgatttgagggattacaaagccaccggcccgcacgttgccgttgcgaagaggctcgcggcgcgtggagtgaaaatccggcccggcacggtgataagctacatcgtcctaaagggctctggaaggataggcgacagggcgattccagctgatgagttcgacccgacgaagcaccgctacgatgcggaatactacatcgagaaccaggttctcccggcggtggagaggattctaaaagccttcggctatcggaaggaggatttgcgctaccagaagacgaagcaggtcggctcgggcgcgtggctgaaggtgaaggggaagaagggtaccgaagcttacgtagaacaaaaactcatctcagaagaggatctgaatagcgccgtcgaccatcatcatcatcatcattga

SEQ ID NO: 688 - protein, 802 aa, Artificial Sequence
  Description of Artificial Sequence:Thermococcus species 9degreesN-7 mutant DNA polymerase, 9degreesN mutant
MILDTDYITENGKPVIRVFKKENGEFKIEYDRTFEPYFYALLKDDSAIEDVKKVTAKRHGTVVKVKRAEKVQKKFLGRPIEVWKLYFNHPQDVPAIRDRIRAHPAVVDIYEYDIPFAKRYLIDKGLIPMEGDEELTMLAFAIATLYHEGEEFGTGPILMISYADGSEARVITWKKIDLPYVDVVSTEKEMIKRFLRVVREKDPDVLITYNGDNFDFAYLKKRCEELGIKFTLGRDGSEPKIQRMGDRFAVEVKGRIHFDLYPVIRRTINLPTYTLEAVYEAVFGKPKEKVYAEEIAQAWESGEGLERVARYSMEDAKVTYELGREFFPMEAQLSRLIGQSLWDVSRSSTGNLVEAFLLRKAYKRNELAPNKPDERELARRRGGYAGGYVKEPERGLWDNIVYLDFRSWYPSIIITHNVSPDTLNREGCKEYDVAPEVGHKFCKDFPGFIPSLLGDLLEEASKIERKMKATVDPLEKKLLVYRQWLIKILANSFPGYYGYAKARWYCKECAESVTAWGREYIEMVIRELEEKFGFKVLYADTDGLHATIPGADAETVKKKAKEFLKYINPKLPGLLELEYEGFYVRGFFVTKKKYAVIDEEGKITTRGLEIVRRDWSEIAKETQARVLEAILKHGDVEEAVRIVKEVTEKLSKYEVPPEKLVIHEQITRDLRDYKATGPHVAVAKRLAARGVKIRPGTVISYIVLKGSGRIGDRAIPADEFDPTKHRYDAEYYIENQVLPAVERILKAFGYRKEDLRYQKTKQVGSGAWLKVKGKKGTEAYVEQKLISEEDLNSAVDHHHHHH

SEQ ID NO: 689 - DNA, 2409 bp, Artificial Sequence
  Description of Artificial Sequence:Thermococcus species 9degreesN-7 mutant DNA polymerase, 9degreesN mutant
atgattctcgataccgactacatcaccgagaacgggaagcccgtgataagggtcttcaagaaggagaacggcgagtttaaaatcgagtacgacagaaccttcgagccctacttctacgcccttctgaaggacgattctgcgatagaggacgtcaagaaggtaaccgcaaagaggcacggaacggttgtcaaggtgaagcgcgccgagaaggtgcagaagaagttcctcggcaggccgatagaggtctggaagctctacttcaaccatcctcaggacgtcccggcgattcgagacaggatacgcgcccaccccgctgtcgttgacatctacgagtacgacatacccttcgccaagcgctacctcatcgacaagggcctgattccgatggagggcgacgaggagcttacgatgctcgccttcgcgatcgcaaccctctatcacgagggcgaggagttcggaaccgggccgattctcatgataagctacgccgacgggagcgaggcgagggtgataacctggaagaagattgaccttccgtacgttgacgtcgtctcgaccgagaaggagatgattaagcgcttcctccgcgtcgtcagggagaaggaccccgacgtgctcatcacctacaacggcgacaacttcgacttcgcctacctgaagaagcgctgtgaggaactcggaataaagttcacactcggcagggacgggagcgagccgaagatacagcgaatgggcgaccgctttgccgttgaggtgaagggcaggattcacttcgacctctaccccgtcataaggcgcacgataaacctcccgacctacacccttgaggccgtttacgaggccgtctttggaaagcccaaggagaaggtttacgcagaggagatagcgcaggcctgggagagcggggagggccttgaaagggttgcaagatactcgatggaggacgctaaggtgacctacgagctgggaagggagttcttcccgatggaggcccagctttcgaggcttataggccagagcctctgggacgtctcgcgctcgagcaccggaaatttggtggaggcattcctcctgcggaaggcctacaagaggaacgagctcgccccaaacaagcccgacgagagggagctcgcgagacggcgcgggggctacgctggcgggtacgttaaggaaccagagcggggattgtgggacaacattgtgtatttagacttccgctcgtggtatccttcaatcatcataacccacaacgtctcgccggataccctcaaccgcgagggctgtaaagagtacgacgtcgcccctgaggttggacacaagttctgcaaggacttccccggcttcataccaagcctcctgggagatttgctcgaggaggcgagcaagatagagcggaagatgaaggcaacggttgacccgctggagaagaaactcctcgtgtacaggcagtggcttataaaaatcctcgccaacagcttcgtgggctactacggctacgccaaggcccggtggtactgcaaggagtgcgccgagagcgttacggcctggggaagggagtatatagaaatggttatccgggaactcgaagaaaaattcggttttaaagttctctatgccgatacagacggtctccatgctaccattcccggagcagacgctgaaacagtcaagaaaaaagcaaaggagttcttaaaatacattaatccaaaactgcccggcctgctcgaacttgagtacgagggcttctacgtgaggggcttcttcgtcacgaagaagaagtacgctgtgatagacgaggagggcaagataaccacgaggggtcttgagattgtgaggcgcgactggagcgagatagcgaaggagacccaggccagggtcttagaggcgatactcaagcacggtgacgtcgaggaggccgttaggatagtcaaggaagtgacggaaaagctgagcaagtatgaggtcccgcccgagaagctggtaatccacgagcagataacgcgcgatttgagggattacaaagccaccggcccgcacgttgccgttgcgaagaggctcgcggcgcgtggagtgaaaatccggcccggcacggtgataagctacatcgtcctaaagggctctggaaggataggcgacagggcgattccagctgatgagttcgacccgacgaagcaccgctacgatgcggaatactacatcgagaaccaggttctcccggcggtggagaggattctaaaagccttcggctatcggaaggaggatttgcgctaccagaagacgaagcaggtcggctcgggcgcgtggctgaaggtgaaggggaagaagggtaccgaagcttacgtagaacaaaaactcatctcagaagaggatctgaatagcgccgtcgaccatcatcatcatcatcattga

SEQ ID NO: 690 - protein, 802 aa, Artificial Sequence
  Description of Artificial Sequence:Thermococcus species 9degreesN-7 mutant DNA polymerase, 9degreesN mutant
MILDTDYITENGKPVIRVFKKENGEFKIEYDRTFEPYFYALLKDDSAIEDVKKVTAKRHGTVVKVKRAEKVQKKFLGRPIEVWKLYFNHPQDVPAIRDRIRAHPAVVDIYEYDIPFAKRYLIDKGLIPMEGDEELTMLAFAIATLYHEGEEFGTGPILMISYADGSEARVITWKKIDLPYVDVVSTEKEMIKRFLRVVREKDPDVLITYNGDNFDFAYLKKRCEELGIKFTLGRDGSEPKIQRMGDRFAVEVKGRIHFDLYPVIRRTINLPTYTLEAVYEAVFGKPKEKVYAEEIAQAWESGEGLERVARYSMEDAKVTYELGREFFPMEAQLSRLIGQSLWDVSRSSTGNLVEAFLLRKAYKRNELAPNKPDERELARRRGGYAGGYVKEPERGLWDNIVYLDFRSWYPSIIITHNVSPDTLNREGCKEYDVAPEVGHKFCKDFPGFIPSLLGDLLEEASKIERKMKATVDPLEKKLLVYRQWLIKILANSFVGYYGYAKARWYCKECAESVTAWGREYIEMVIRELEEKFGFKVLYADTDGLHATIPGADAETVKKKAKEFLKYINPKLPGLLELEYEGFYVRGFFVTKKKYAVIDEEGKITTRGLEIVRRDWSEIAKETQARVLEAILKHGDVEEAVRIVKEVTEKLSKYEVPPEKLVIHEQITRDLRDYKATGPHVAVAKRLAARGVKIRPGTVISYIVLKGSGRIGDRAIPADEFDPTKHRYDAEYYIENQVLPAVERILKAFGYRKEDLRYQKTKQVGSGAWLKVKGKKGTEAYVEQKLISEEDLNSAVDHHHHHH

SEQ ID NO: 691 - DNA, 2409 bp, Artificial Sequence
  Description of Artificial Sequence:Thermococcus species 9degreesN-7 mutant DNA polymerase, 9degreesN mutant
atgattctcgataccgactacatcaccgagaacgggaagcccgtgataagggtcttcaagaaggagaacggcgagtttaaaatcgagtacgacagaaccttcgagccctacttctacgcccttctgaaggacgattctgcgatagaggacgtcaagaaggtaaccgcaaagaggcacggaacggttgtcaaggtgaagcgcgccgagaaggtgcagaagaagttcctcggcaggccgatagaggtctggaagctctacttcaaccatcctcaggacgtcccggcgattcgagacaggatacgcgcccaccccgctgtcgttgacatctacgagtacgacatacccttcgccaagcgctacctcatcgacaagggcctgattccgatggagggcgacgaggagcttacgatgctcgccttcgcgatcgcaaccctctatcacgagggcgaggagttcggaaccgggccgattctcatgataagctacgccgacgggagcgaggcgagggtgataacctggaagaagattgaccttccgtacgttgacgtcgtctcgaccgagaaggagatgattaagcgcttcctccgcgtcgtcagggagaaggaccccgacgtgctcatcacctacaacggcgacaacttcgacttcgcctacctgaagaagcgctgtgaggaactcggaataaagttcacactcggcagggacgggagcgagccgaagatacagcgaatgggcgaccgctttgccgttgaggtgaagggcaggattcacttcgacctctaccccgtcataaggcgcacgataaacctcccgacctacacccttgaggccgtttacgaggccgtctttggaaagcccaaggagaaggtttacgcagaggagatagcgcaggcctgggagagcggggagggccttgaaagggttgcaagatactcgatggaggacgctaaggtgacctacgagctgggaagggagttcttcccgatggaggcccagctttcgaggcttataggccagagcctctgggacgtctcgcgctcgagcaccggaaatttggtggaggcattcctcctgcggaaggcctacaagaggaacgagctcgccccaaacaagcccgacgagagggagctcgcgagacggcgcgggggctacgctggcgggtacgttaaggaaccagagcggggattgtgggacaacattgtgtatttagacttccgctcgtggtatccttcaatcatcataacccacaacgtctcgccggataccctcaaccgcgagggctgtaaagagtacgacgtcgcccctgaggttggacacaagttctgcaaggacttccccggcttcataccaagcctcctgggagatttgctcgaggaggcgagcaagatagagcggaagatgaaggcaacggttgacccgctggagaagaaactcctcgtgtacaggcagtggcttataaaaatcctcgccaacagcttcaacggctactacggctacgccaaggcccggtggtactgcaaggagtgcgccgagagcgttacggcctggggaagggagtatatagaaatggttatccgggaactcgaagaaaaattcggttttaaagttctctatgccgatacagacggtctccatgctaccattcccggagcagacgctgaaacagtcaagaaaaaagcaaaggagttcttaaaatacattaatccaaaactgcccggcctgctcgaacttgagtacgagggcttctacgtgaggggcttcttcgtcacgaagaagaagtacgctgtgatagacgaggagggcaagataaccacgaggggtcttgagattgtgaggcgcgactggagcgagatagcgaaggagacccaggccagggtcttagaggcgatactcaagcacggtgacgtcgaggaggccgttaggatagtcaaggaagtgacggaaaagctgagcaagtatgaggtcccgcccgagaagctggtaatccacgagcagataacgcgcgatttgagggattacaaagccaccggcccgcacgttgccgttgcgaagaggctcgcggcgcgtggagtgaaaatccggcccggcacggtgataagctacatcgtcctaaagggctctggaaggataggcgacagggcgattccagctgatgagttcgacccgacgaagcaccgctacgatgcggaatactacatcgagaaccaggttctcccggcggtggagaggattctaaaagccttcggctatcggaaggaggatttgcgctaccagaagacgaagcaggtcggctcgggcgcgtggctgaaggtgaaggggaagaagggtaccgaagcttacgtagaacaaaaactcatctcagaagaggatctgaatagcgccgtcgaccatcatcatcatcatcattga

SEQ ID NO: 692 - protein, 802 aa, Artificial Sequence
  Description of Artificial Sequence:Thermococcus species 9degreesN-7 mutant DNA polymerase, 9degreesN mutant
MILDTDYITENGKPVIRVFKKENGEFKIEYDRTFEPYFYALLKDDSAIEDVKKVTAKRHGTVVKVKRAEKVQKKFLGRPIEVWKLYFNHPQDVPAIRDRIRAHPAVVDIYEYDIPFAKRYLIDKGLIPMEGDEELTMLAFAIATLYHEGEEFGTGPILMISYADGSEARVITWKKIDLPYVDVVSTEKEMIKRFLRVVREKDPDVLITYNGDNFDFAYLKKRCEELGIKFTLGRDGSEPKIQRMGDRFAVEVKGRIHFDLYPVIRRTINLPTYTLEAVYEAVFGKPKEKVYAEEIAQAWESGEGLERVARYSMEDAKVTYELGREFFPMEAQLSRLIGQSLWDVSRSSTGNLVEAFLLRKAYKRNELAPNKPDERELARRRGGYAGGYVKEPERGLWDNIVYLDFRSWYPSIIITHNVSPDTLNREGCKEYDVAPEVGHKFCKDFPGFIPSLLGDLLEEASKIERKMKATVDPLEKKLLVYRQWLIKILANSFNGYYGYAKARWYCKECAESVTAWGREYIEMVIRELEEKFGFKVLYADTDGLHATIPGADAETVKKKAKEFLKYINPKLPGLLELEYEGFYVRGFFVTKKKYAVIDEEGKITTRGLEIVRRDWSEIAKETQARVLEAILKHGDVEEAVRIVKEVTEKLSKYEVPPEKLVIHEQITRDLRDYKATGPHVAVAKRLAARGVKIRPGTVISYIVLKGSGRIGDRAIPADEFDPTKHRYDAEYYIENQVLPAVERILKAFGYRKEDLRYQKTKQVGSGAWLKVKGKKGTEAYVEQKLISEEDLNSAVDHHHHHH

SEQ ID NO: 693 - DNA, 2409 bp, Artificial Sequence
  Description of Artificial Sequence:Thermococcus species 9degreesN-7 mutant DNA polymerase, 9degreesN mutant
atgattctcgataccgactacatcaccgagaacgggaagcccgtgataagggtcttcaagaaggagaacggcgagtttaaaatcgagtacgacagaaccttcgagccctacttctacgcccttctgaaggacgattctgcgatagaggacgtcaagaaggtaaccgcaaagaggcacggaacggttgtcaaggtgaagcgcgccgagaaggtgcagaagaagttcctcggcaggccgatagaggtctggaagctctacttcaaccatcctcaggacgtcccggcgattcgagacaggatacgcgcccaccccgctgtcgttgacatctacgagtacgacatacccttcgccaagcgctacctcatcgacaagggcctgattccgatggagggcgacgaggagcttacgatgctcgccttcgcgatcgcaaccctctatcacgagggcgaggagttcggaaccgggccgattctcatgataagctacgccgacgggagcgaggcgagggtgataacctggaagaagattgaccttccgtacgttgacgtcgtctcgaccgagaaggagatgattaagcgcttcctccgcgtcgtcagggagaaggaccccgacgtgctcatcacctacaacggcgacaacttcgacttcgcctacctgaagaagcgctgtgaggaactcggaataaagttcacactcggcagggacgggagcgagccgaagatacagcgaatgggcgaccgctttgccgttgaggtgaagggcaggattcacttcgacctctaccccgtcataaggcgcacgataaacctcccgacctacacccttgaggccgtttacgaggccgtctttggaaagcccaaggagaaggtttacgcagaggagatagcgcaggcctgggagagcggggagggccttgaaagggttgcaagatactcgatggaggacgctaaggtgacctacgagctgggaagggagttcttcccgatggaggcccagctttcgaggcttataggccagagcctctgggacgtctcgcgctcgagcaccggaaatttggtggaggcattcctcctgcggaaggcctacaagaggaacgagctcgccccaaacaagcccgacgagagggagctcgcgagacggcgcgggggctacgctggcgggtacgttaaggaaccagagcggggattgtgggacaacattgtgtatttagacttccgctcgtggtatccttcaatcatcataacccacaacgtctcgccggataccctcaaccgcgagggctgtaaagagtacgacgtcgcccctgaggttggacacaagttctgcaaggacttccccggcttcataccaagcctcctgggagatttgctcgaggaggcgagcaagatagagcggaagatgaaggcaacggttgacccgctggagaagaaactcctcgtgtacaggcagtggcttataaaaatcctcgccaacagcttcagcggctactacggctacgccaaggcccggtggtactgcaaggagtgcgccgagagcgttacggcctggggaagggagtatatagaaatggttatccgggaactcgaagaaaaattcggttttaaagttctctatgccgatacagacggtctccatgctaccattcccggagcagacgctgaaacagtcaagaaaaaagcaaaggagttcttaaaatacattaatccaaaactgcccggcctgctcgaacttgagtacgagggcttctacgtgaggggcttcttcgtcacgaagaagaagtacgctgtgatagacgaggagggcaagataaccacgaggggtcttgagattgtgaggcgcgactggagcgagatagcgaaggagacccaggccagggtcttagaggcgatactcaagcacggtgacgtcgaggaggccgttaggatagtcaaggaagtgacggaaaagctgagcaagtatgaggtcccgcccgagaagctggtaatccacgagcagataacgcgcgatttgagggattacaaagccaccggcccgcacgttgccgttgcgaagaggctcgcggcgcgtggagtgaaaatccggcccggcacggtgataagctacatcgtcctaaagggctctggaaggataggcgacagggcgattccagctgatgagttcgacccgacgaagcaccgctacgatgcggaatactacatcgagaaccaggttctcccggcggtggagaggattctaaaagccttcggctatcggaaggaggatttgcgctaccagaagacgaagcaggtcggctcgggcgcgtggctgaaggtgaaggggaagaagggtaccgaagcttacgtagaacaaaaactcatctcagaagaggatctgaatagcgccgtcgaccatcatcatcatcatcattga

SEQ ID NO: 694 - protein, 802 aa, Artificial Sequence
  Description of Artificial Sequence:Thermococcus species 9degreesN-7 mutant DNA polymerase, 9degreesN mutant
MILDTDYITENGKPVIRVFKKENGEFKIEYDRTFEPYFYALLKDDSAIEDVKKVTAKRHGTVVKVKRAEKVQKKFLGRPIEVWKLYFNHPQDVPAIRDRIRAHPAVVDIYEYDIPFAKRYLIDKGLIPMEGDEELTMLAFAIATLYHEGEEFGTGPILMISYADGSEARVITWKKIDLPYVDVVSTEKEMIKRFLRVVREKDPDVLITYNGDNFDFAYLKKRCEELGIKFTLGRDGSEPKIQRMGDRFAVEVKGRIHFDLYPVIRRTINLPTYTLEAVYEAVFGKPKEKVYAEEIAQAWESGEGLERVARYSMEDAKVTYELGREFFPMEAQLSRLIGQSLWDVSRSSTGNLVEAFLLRKAYKRNELAPNKPDERELARRRGGYAGGYVKEPERGLWDNIVYLDFRSWYPSIIITHNVSPDTLNREGCKEYDVAPEVGHKFCKDFPGFIPSLLGDLLEEASKIERKMKATVDPLEKKLLVYRQWLIKILANSFSGYYGYAKARWYCKECAESVTAWGREYIEMVIRELEEKFGFKVLYADTDGLHATIPGADAETVKKKAKEFLKYINPKLPGLLELEYEGFYVRGFFVTKKKYAVIDEEGKITTRGLEIVRRDWSEIAKETQARVLEAILKHGDVEEAVRIVKEVTEKLSKYEVPPEKLVIHEQITRDLRDYKATGPHVAVAKRLAARGVKIRPGTVISYIVLKGSGRIGDRAIPADEFDPTKHRYDAEYYIENQVLPAVERILKAFGYRKEDLRYQKTKQVGSGAWLKVKGKKGTEAYVEQKLISEEDLNSAVDHHHHHH

SEQ ID NO: 695 - DNA, 2409 bp, Artificial Sequence
  Description of Artificial Sequence:Thermococcus species 9degreesN-7 mutant DNA polymerase, 9degreesN mutant
atgattctcgataccgactacatcaccgagaacgggaagcccgtgataagggtcttcaagaaggagaacggcgagtttaaaatcgagtacgacagaaccttcgagccctacttctacgcccttctgaaggacgattctgcgatagaggacgtcaagaaggtaaccgcaaagaggcacggaacggttgtcaaggtgaagcgcgccgagaaggtgcagaagaagttcctcggcaggccgatagaggtctggaagctctacttcaaccatcctcaggacgtcccggcgattcgagacaggatacgcgcccaccccgctgtcgttgacatctacgagtacgacatacccttcgccaagcgctacctcatcgacaagggcctgattccgatggagggcgacgaggagcttacgatgctcgccttcgcgatcgcaaccctctatcacgagggcgaggagttcggaaccgggccgattctcatgataagctacgccgacgggagcgaggcgagggtgataacctggaagaagattgaccttccgtacgttgacgtcgtctcgaccgagaaggagatgattaagcgcttcctccgcgtcgtcagggagaaggaccccgacgtgctcatcacctacaacggcgacaacttcgacttcgcctacctgaagaagcgctgtgaggaactcggaataaagttcacactcggcagggacgggagcgagccgaagatacagcgaatgggcgaccgctttgccgttgaggtgaagggcaggattcacttcgacctctaccccgtcataaggcgcacgataaacctcccgacctacacccttgaggccgtttacgaggccgtctttggaaagcccaaggagaaggtttacgcagaggagatagcgcaggcctgggagagcggggagggccttgaaagggttgcaagatactcgatggaggacgctaaggtgacctacgagctgggaagggagttcttcccgatggaggcccagctttcgaggcttataggccagagcctctgggacgtctcgcgctcgagcaccggaaatttggtggaggcattcctcctgcggaaggcctacaagaggaacgagctcgccccaaacaagcccgacgagagggagctcgcgagacggcgcgggggctacgctggcgggtacgttaaggaaccagagcggggattgtgggacaacattgtgtatttagacttccgctcgtggtatccttcaatcatcataacccacaacgtctcgccggataccctcaaccgcgagggctgtaaagagtacgacgtcgcccctgaggttggacacaagttctgcaaggacttccccggcttcataccaagcctcctgggagatttgctcgaggaggcgagcaagatagagcggaagatgaaggcaacggttgacccgctggagaagaaactcctcgtgtacaggcagtggcttataaaaatcctcgccaacagcttcgggggctactacggctacgccaaggcccggtggtactgcaaggagtgcgccgagagcgttacggcctggggaagggagtatatagaaatggttatccgggaactcgaagaaaaattcggttttaaagttctctatgccgatacagacggtctccatgctaccattcccggagcagacgctgaaacagtcaagaaaaaagcaaaggagttcttaaaatacattaatccaaaactgcccggcctgctcgaacttgagtacgagggcttctacgtgaggggcttcttcgtcacgaagaagaagtacgctgtgatagacgaggagggcaagataaccacgaggggtcttgagattgtgaggcgcgactggagcgagatagcgaaggagacccaggccagggtcttagaggcgatactcaagcacggtgacgtcgaggaggccgttaggatagtcaaggaagtgacggaaaagctgagcaagtatgaggtcccgcccgagaagctggtaatccacgagcagataacgcgcgatttgagggattacaaagccaccggcccgcacgttgccgttgcgaagaggctcgcggcgcgtggagtgaaaatccggcccggcacggtgataagctacatcgtcctaaagggctctggaaggataggcgacagggcgattccagctgatgagttcgacccgacgaagcaccgctacgatgcggaatactacatcgagaaccaggttctcccggcggtggagaggattctaaaagccttcggctatcggaaggaggatttgcgctaccagaagacgaagcaggtcggctcgggcgcgtggctgaaggtgaaggggaagaagggtaccgaagcttacgtagaacaaaaactcatctcagaagaggatctgaatagcgccgtcgaccatcatcatcatcatcattga

SEQ ID NO: 696 - protein, 802 aa, Artificial Sequence
  Description of Artificial Sequence:Thermococcus species 9degreesN-7 mutant DNA polymerase, 9degreesN mutant
MILDTDYITENGKPVIRVFKKENGEFKIEYDRTFEPYFYALLKDDSAIEDVKKVTAKRHGTVVKVKRAEKVQKKFLGRPIEVWKLYFNHPQDVPAIRDRIRAHPAVVDIYEYDIPFAKRYLIDKGLIPMEGDEELTMLAFAIATLYHEGEEFGTGPILMISYADGSEARVITWKKIDLPYVDVVSTEKEMIKRFLRVVREKDPDVLITYNGDNFDFAYLKKRCEELGIKFTLGRDGSEPKIQRMGDRFAVEVKGRIHFDLYPVIRRTINLPTYTLEAVYEAVFGKPKEKVYAEEIAQAWESGEGLERVARYSMEDAKVTYELGREFFPMEAQLSRLIGQSLWDVSRSSTGNLVEAFLLRKAYKRNELAPNKPDERELARRRGGYAGGYVKEPERGLWDNIVYLDFRSWYPSIIITHNVSPDTLNREGCKEYDVAPEVGHKFCKDFPGFIPSLLGDLLEEASKIERKMKATVDPLEKKLLVYRQWLIKILANSFGGYYGYAKARWYCKECAESVTAWGREYIEMVIRELEEKFGFKVLYADTDGLHATIPGADAETVKKKAKEFLKYINPKLPGLLELEYEGFYVRGFFVTKKKYAVIDEEGKITTRGLEIVRRDWSEIAKETQARVLEAILKHGDVEEAVRIVKEVTEKLSKYEVPPEKLVIHEQITRDLRDYKATGPHVAVAKRLAARGVKIRPGTVISYIVLKGSGRIGDRAIPADEFDPTKHRYDAEYYIENQVLPAVERILKAFGYRKEDLRYQKTKQVGSGAWLKVKGKKGTEAYVEQKLISEEDLNSAVDHHHHHH

SEQ ID NO: 697 - DNA, 2409 bp, Artificial Sequence
  Description of Artificial Sequence:Thermococcus species 9degreesN-7 mutant DNA polymerase, 9degreesN mutant
atgattctcgataccgactacatcaccgagaacgggaagcccgtgataagggtcttcaagaaggagaacggcgagtttaaaatcgagtacgacagaaccttcgagccctacttctacgcccttctgaaggacgattctgcgatagaggacgtcaagaaggtaaccgcaaagaggcacggaacggttgtcaaggtgaagcgcgccgagaaggtgcagaagaagttcctcggcaggccgatagaggtctggaagctctacttcaaccatcctcaggacgtcccggcgattcgagacaggatacgcgcccaccccgctgtcgttgacatctacgagtacgacatacccttcgccaagcgctacctcatcgacaagggcctgattccgatggagggcgacgaggagcttacgatgctcgccttcgcgatcgcaaccctctatcacgagggcgaggagttcggaaccgggccgattctcatgataagctacgccgacgggagcgaggcgagggtgataacctggaagaagattgaccttccgtacgttgacgtcgtctcgaccgagaaggagatgattaagcgcttcctccgcgtcgtcagggagaaggaccccgacgtgctcatcacctacaacggcgacaacttcgacttcgcctacctgaagaagcgctgtgaggaactcggaataaagttcacactcggcagggacgggagcgagccgaagatacagcgaatgggcgaccgctttgccgttgaggtgaagggcaggattcacttcgacctctaccccgtcataaggcgcacgataaacctcccgacctacacccttgaggccgtttacgaggccgtctttggaaagcccaaggagaaggtttacgcagaggagatagcgcaggcctgggagagcggggagggccttgaaagggttgcaagatactcgatggaggacgctaaggtgacctacgagctgggaagggagttcttcccgatggaggcccagctttcgaggcttataggccagagcctctgggacgtctcgcgctcgagcaccggaaatttggtggaggcattcctcctgcggaaggcctacaagaggaacgagctcgccccaaacaagcccgacgagagggagctcgcgagacggcgcgggggctacgctggcgggtacgttaaggaaccagagcggggattgtgggacaacattgtgtatttagacttccgctcgtggtatccttcaatcatcataacccacaacgtctcgccggataccctcaaccgcgagggctgtaaagagtacgacgtcgcccctgaggttggacacaagttctgcaaggacttccccggcttcataccaagcctcctgggagatttgctcgaggaggcgagcaagatagagcggaagatgaaggcaacggttgacccgctggagaagaaactcctcgtgtacaggcagtggcttataaaaatcctcgccaacagcttccttggctactacggctacgccaaggcccggtggtactgcaaggagtgcgccgagagcgttacggcctggggaagggagtatatagaaatggttatccgggaactcgaagaaaaattcggttttaaagttctctatgccgatacagacggtctccatgctaccattcccggagcagacgctgaaacagtcaagaaaaaagcaaaggagttcttaaaatacattaatccaaaactgcccggcctgctcgaacttgagtacgagggcttctacgtgaggggcttcttcgtcacgaagaagaagtacgctgtgatagacgaggagggcaagataaccacgaggggtcttgagattgtgaggcgcgactggagcgagatagcgaaggagacccaggccagggtcttagaggcgatactcaagcacggtgacgtcgaggaggccgttaggatagtcaaggaagtgacggaaaagctgagcaagtatgaggtcccgcccgagaagctggtaatccacgagcagataacgcgcgatttgagggattacaaagccaccggcccgcacgttgccgttgcgaagaggctcgcggcgcgtggagtgaaaatccggcccggcacggtgataagctacatcgtcctaaagggctctggaaggataggcgacagggcgattccagctgatgagttcgacccgacgaagcaccgctacgatgcggaatactacatcgagaaccaggttctcccggcggtggagaggattctaaaagccttcggctatcggaaggaggatttgcgctaccagaagacgaagcaggtcggctcgggcgcgtggctgaaggtgaaggggaagaagggtaccgaagcttacgtagaacaaaaactcatctcagaagaggatctgaatagcgccgtcgaccatcatcatcatcatcattga

SEQ ID NO: 698 - protein, 802 aa, Artificial Sequence
  Description of Artificial Sequence:Thermococcus species 9degreesN-7 mutant DNA polymerase, 9degreesN mutant
MILDTDYITENGKPVIRVFKKENGEFKIEYDRTFEPYFYALLKDDSAIEDVKKVTAKRHGTVVKVKRAEKVQKKFLGRPIEVWKLYFNHPQDVPAIRDRIRAHPAVVDIYEYDIPFAKRYLIDKGLIPMEGDEELTMLAFAIATLYHEGEEFGTGPILMISYADGSEARVITWKKIDLPYVDVVSTEKEMIKRFLRVVREKDPDVLITYNGDNFDFAYLKKRCEELGIKFTLGRDGSEPKIQRMGDRFAVEVKGRIHFDLYPVIRRTINLPTYTLEAVYEAVFGKPKEKVYAEEIAQAWESGEGLERVARYSMEDAKVTYELGREFFPMEAQLSRLIGQSLWDVSRSSTGNLVEAFLLRKAYKRNELAPNKPDERELARRRGGYAGGYVKEPERGLWDNIVYLDFRSWYPSIIITHNVSPDTLNREGCKEYDVAPEVGHKFCKDFPGFIPSLLGDLLEEASKIERKMKATVDPLEKKLLVYRQWLIKILANSFLGYYGYAKARWYCKECAESVTAWGREYIEMVIRELEEKFGFKVLYADTDGLHATIPGADAETVKKKAKEFLKYINPKLPGLLELEYEGFYVRGFFVTKKKYAVIDEEGKITTRGLEIVRRDWSEIAKETQARVLEAILKHGDVEEAVRIVKEVTEKLSKYEVPPEKLVIHEQITRDLRDYKATGPHVAVAKRLAARGVKIRPGTVISYIVLKGSGRIGDRAIPADEFDPTKHRYDAEYYIENQVLPAVERILKAFGYRKEDLRYQKTKQVGSGAWLKVKGKKGTEAYVEQKLISEEDLNSAVDHHHHHH

SEQ ID NO: 699 - DNA, 2409 bp, Artificial Sequence
  Description of Artificial Sequence:Thermococcus species 9degreesN-7 mutant DNA polymerase, 9degreesN mutant
atgattctcgataccgactacatcaccgagaacgggaagcccgtgataagggtcttcaagaaggagaacggcgagtttaaaatcgagtacgacagaaccttcgagccctacttctacgcccttctgaaggacgattctgcgatagaggacgtcaagaaggtaaccgcaaagaggcacggaacggttgtcaaggtgaagcgcgccgagaaggtgcagaagaagttcctcggcaggccgatagaggtctggaagctctacttcaaccatcctcaggacgtcccggcgattcgagacaggatacgcgcccaccccgctgtcgttgacatctacgagtacgacatacccttcgccaagcgctacctcatcgacaagggcctgattccgatggagggcgacgaggagcttacgatgctcgccttcgcgatcgcaaccctctatcacgagggcgaggagttcggaaccgggccgattctcatgataagctacgccgacgggagcgaggcgagggtgataacctggaagaagattgaccttccgtacgttgacgtcgtctcgaccgagaaggagatgattaagcgcttcctccgcgtcgtcagggagaaggaccccgacgtgctcatcacctacaacggcgacaacttcgacttcgcctacctgaagaagcgctgtgaggaactcggaataaagttcacactcggcagggacgggagcgagccgaagatacagcgaatgggcgaccgctttgccgttgaggtgaagggcaggattcacttcgacctctaccccgtcataaggcgcacgataaacctcccgacctacacccttgaggccgtttacgaggccgtctttggaaagcccaaggagaaggtttacgcagaggagatagcgcaggcctgggagagcggggagggccttgaaagggttgcaagatactcgatggaggacgctaaggtgacctacgagctgggaagggagttcttcccgatggaggcccagctttcgaggcttataggccagagcctctgggacgtctcgcgctcgagcaccggaaatttggtggaggcattcctcctgcggaaggcctacaagaggaacgagctcgccccaaacaagcccgacgagagggagctcgcgagacggcgcgggggctacgctggcgggtacgttaaggaaccagagcggggattgtgggacaacattgtgtatttagacttccgctcgtggtatccttcaatcatcataacccacaacgtctcgccggataccctcaaccgcgagggctgtaaagagtacgacgtcgcccctgaggttggacacaagttctgcaaggacttccccggcttcataccaagcctcctgggagatttgctcgaggaggcgagcaagatagagcggaagatgaaggcaacggttgacccgctggagaagaaactcctcgtgtacaggcagtggcttataaaaatcctcgccaacagcttcacgggctactacggctacgccaaggcccggtggtactgcaaggagtgcgccgagagcgttacggcctggggaagggagtatatagaaatggttatccgggaactcgaagaaaaattcggttttaaagttctctatgccgatacagacggtctccatgctaccattcccggagcagacgctgaaacagtcaagaaaaaagcaaaggagttcttaaaatacattaatccaaaactgcccggcctgctcgaacttgagtacgagggcttctacgtgaggggcttcttcgtcacgaagaagaagtacgctgtgatagacgaggagggcaagataaccacgaggggtcttgagattgtgaggcgcgactggagcgagatagcgaaggagacccaggccagggtcttagaggcgatactcaagcacggtgacgtcgaggaggccgttaggatagtcaaggaagtgacggaaaagctgagcaagtatgaggtcccgcccgagaagctggtaatccacgagcagataacgcgcgatttgagggattacaaagccaccggcccgcacgttgccgttgcgaagaggctcgcggcgcgtggagtgaaaatccggcccggcacggtgataagctacatcgtcctaaagggctctggaaggataggcgacagggcgattccagctgatgagttcgacccgacgaagcaccgctacgatgcggaatactacatcgagaaccaggttctcccggcggtggagaggattctaaaagccttcggctatcggaaggaggatttgcgctaccagaagacgaagcaggtcggctcgggcgcgtggctgaaggtgaaggggaagaagggtaccgaagcttacgtagaacaaaaactcatctcagaagaggatctgaatagcgccgtcgaccatcatcatcatcatcattga

SEQ ID NO: 700 - protein, 802 aa, Artificial Sequence
  Description of Artificial Sequence:Thermococcus species 9degreesN-7 mutant DNA polymerase, 9degreesN mutant
MILDTDYITENGKPVIRVFKKENGEFKIEYDRTFEPYFYALLKDDSAIEDVKKVTAKRHGTVVKVKRAEKVQKKFLGRPIEVWKLYFNHPQDVPAIRDRIRAHPAVVDIYEYDIPFAKRYLIDKGLIPMEGDEELTMLAFAIATLYHEGEEFGTGPILMISYADGSEARVITWKKIDLPYVDVVSTEKEMIKRFLRVVREKDPDVLITYNGDNFDFAYLKKRCEELGIKFTLGRDGSEPKIQRMGDRFAVEVKGRIHFDLYPVIRRTINLPTYTLEAVYEAVFGKPKEKVYAEEIAQAWESGEGLERVARYSMEDAKVTYELGREFFPMEAQLSRLIGQSLWDVSRSSTGNLVEAFLLRKAYKRNELAPNKPDERELARRRGGYAGGYVKEPERGLWDNIVYLDFRSWYPSIIITHNVSPDTLNREGCKEYDVAPEVGHKFCKDFPGFIPSLLGDLLEEASKIERKMKATVDPLEKKLLVYRQWLIKILANSFTGYYGYAKARWYCKECAESVTAWGREYIEMVIRELEEKFGFKVLYADTDGLHATIPGADAETVKKKAKEFLKYINPKLPGLLELEYEGFYVRGFFVTKKKYAVIDEEGKITTRGLEIVRRDWSEIAKETQARVLEAILKHGDVEEAVRIVKEVTEKLSKYEVPPEKLVIHEQITRDLRDYKATGPHVAVAKRLAARGVKIRPGTVISYIVLKGSGRIGDRAIPADEFDPTKHRYDAEYYIENQVLPAVERILKAFGYRKEDLRYQKTKQVGSGAWLKVKGKKGTEAYVEQKLISEEDLNSAVDHHHHHH

SEQ ID NO: 701 - DNA, 2409 bp, Artificial Sequence
  Description of Artificial Sequence:Thermococcus species 9degreesN-7 mutant DNA polymerase, 9degreesN mutant
atgattctcgataccgactacatcaccgagaacgggaagcccgtgataagggtcttcaagaaggagaacggcgagtttaaaatcgagtacgacagaaccttcgagccctacttctacgcccttctgaaggacgattctgcgatagaggacgtcaagaaggtaaccgcaaagaggcacggaacggttgtcaaggtgaagcgcgccgagaaggtgcagaagaagttcctcggcaggccgatagaggtctggaagctctacttcaaccatcctcaggacgtcccggcgattcgagacaggatacgcgcccaccccgctgtcgttgacatctacgagtacgacatacccttcgccaagcgctacctcatcgacaagggcctgattccgatggagggcgacgaggagcttacgatgctcgccttcgcgatcgcaaccctctatcacgagggcgaggagttcggaaccgggccgattctcatgataagctacgccgacgggagcgaggcgagggtgataacctggaagaagattgaccttccgtacgttgacgtcgtctcgaccgagaaggagatgattaagcgcttcctccgcgtcgtcagggagaaggaccccgacgtgctcatcacctacaacggcgacaacttcgacttcgcctacctgaagaagcgctgtgaggaactcggaataaagttcacactcggcagggacgggagcgagccgaagatacagcgaatgggcgaccgctttgccgttgaggtgaagggcaggattcacttcgacctctaccccgtcataaggcgcacgataaacctcccgacctacacccttgaggccgtttacgaggccgtctttggaaagcccaaggagaaggtttacgcagaggagatagcgcaggcctgggagagcggggagggccttgaaagggttgcaagatactcgatggaggacgctaaggtgacctacgagctgggaagggagttcttcccgatggaggcccagctttcgaggcttataggccagagcctctgggacgtctcgcgctcgagcaccggaaatttggtggaggcattcctcctgcggaaggcctacaagaggaacgagctcgccccaaacaagcccgacgagagggagctcgcgagacggcgcgggggctacgctggcgggtacgttaaggaaccagagcggggattgtgggacaacattgtgtatttagacttccgctcgtggtatccttcaatcatcataacccacaacgtctcgccggataccctcaaccgcgagggctgtaaagagtacgacgtcgcccctgaggttggacacaagttctgcaaggacttccccggcttcataccaagcctcctgggagatttgctcgaggaggcgagcaagatagagcggaagatgaaggcaacggttgacccgctggagaagaaactcctcgtgtacaggcagtggcttataaaaatcctcgccaacagcttcatgggctactacggctacgccaaggcccggtggtactgcaaggagtgcgccgagagcgttacggcctggggaagggagtatatagaaatggttatccgggaactcgaagaaaaattcggttttaaagttctctatgccgatacagacggtctccatgctaccattcccggagcagacgctgaaacagtcaagaaaaaagcaaaggagttcttaaaatacattaatccaaaactgcccggcctgctcgaacttgagtacgagggcttctacgtgaggggcttcttcgtcacgaagaagaagtacgctgtgatagacgaggagggcaagataaccacgaggggtcttgagattgtgaggcgcgactggagcgagatagcgaaggagacccaggccagggtcttagaggcgatactcaagcacggtgacgtcgaggaggccgttaggatagtcaaggaagtgacggaaaagctgagcaagtatgaggtcccgcccgagaagctggtaatccacgagcagataacgcgcgatttgagggattacaaagccaccggcccgcacgttgccgttgcgaagaggctcgcggcgcgtggagtgaaaatccggcccggcacggtgataagctacatcgtcctaaagggctctggaaggataggcgacagggcgattccagctgatgagttcgacccgacgaagcaccgctacgatgcggaatactacatcgagaaccaggttctcccggcggtggagaggattctaaaagccttcggctatcggaaggaggatttgcgctaccagaagacgaagcaggtcggctcgggcgcgtggctgaaggtgaaggggaagaagggtaccgaagcttacgtagaacaaaaactcatctcagaagaggatctgaatagcgccgtcgaccatcatcatcatcatcattga

SEQ ID NO: 702 - protein, 802 aa, Artificial Sequence
  Description of Artificial Sequence:Thermococcus species 9degreesN-7 mutant DNA polymerase, 9degreesN mutant
MILDTDYITENGKPVIRVFKKENGEFKIEYDRTFEPYFYALLKDDSAIEDVKKVTAKRHGTVVKVKRAEKVQKKFLGRPIEVWKLYFNHPQDVPAIRDRIRAHPAVVDIYEYDIPFAKRYLIDKGLIPMEGDEELTMLAFAIATLYHEGEEFGTGPILMISYADGSEARVITWKKIDLPYVDVVSTEKEMIKRFLRVVREKDPDVLITYNGDNFDFAYLKKRCEELGIKFTLGRDGSEPKIQRMGDRFAVEVKGRIHFDLYPVIRRTINLPTYTLEAVYEAVFGKPKEKVYAEEIAQAWESGEGLERVARYSMEDAKVTYELGREFFPMEAQLSRLIGQSLWDVSRSSTGNLVEAFLLRKAYKRNELAPNKPDERELARRRGGYAGGYVKEPERGLWDNIVYLDFRSWYPSIIITHNVSPDTLNREGCKEYDVAPEVGHKFCKDFPGFIPSLLGDLLEEASKIERKMKATVDPLEKKLLVYRQWLIKILANSFMGYYGYAKARWYCKECAESVTAWGREYIEMVIRELEEKFGFKVLYADTDGLHATIPGADAETVKKKAKEFLKYINPKLPGLLELEYEGFYVRGFFVTKKKYAVIDEEGKITTRGLEIVRRDWSEIAKETQARVLEAILKHGDVEEAVRIVKEVTEKLSKYEVPPEKLVIHEQITRDLRDYKATGPHVAVAKRLAARGVKIRPGTVISYIVLKGSGRIGDRAIPADEFDPTKHRYDAEYYIENQVLPAVERILKAFGYRKEDLRYQKTKQVGSGAWLKVKGKKGTEAYVEQKLISEEDLNSAVDHHHHHH

SEQ ID NO: 703 - DNA, 2409 bp, Artificial Sequence
  Description of Artificial Sequence:Thermococcus species 9degreesN-7 mutant DNA polymerase, 9degreesN mutant
atgattctcgataccgactacatcaccgagaacgggaagcccgtgataagggtcttcaagaaggagaacggcgagtttaaaatcgagtacgacagaaccttcgagccctacttctacgcccttctgaaggacgattctgcgatagaggacgtcaagaaggtaaccgcaaagaggcacggaacggttgtcaaggtgaagcgcgccgagaaggtgcagaagaagttcctcggcaggccgatagaggtctggaagctctacttcaaccatcctcaggacgtcccggcgattcgagacaggatacgcgcccaccccgctgtcgttgacatctacgagtacgacatacccttcgccaagcgctacctcatcgacaagggcctgattccgatggagggcgacgaggagcttacgatgctcgccttcgcgatcgcaaccctctatcacgagggcgaggagttcggaaccgggccgattctcatgataagctacgccgacgggagcgaggcgagggtgataacctggaagaagattgaccttccgtacgttgacgtcgtctcgaccgagaaggagatgattaagcgcttcctccgcgtcgtcagggagaaggaccccgacgtgctcatcacctacaacggcgacaacttcgacttcgcctacctgaagaagcgctgtgaggaactcggaataaagttcacactcggcagggacgggagcgagccgaagatacagcgaatgggcgaccgctttgccgttgaggtgaagggcaggattcacttcgacctctaccccgtcataaggcgcacgataaacctcccgacctacacccttgaggccgtttacgaggccgtctttggaaagcccaaggagaaggtttacgcagaggagatagcgcaggcctgggagagcggggagggccttgaaagggttgcaagatactcgatggaggacgctaaggtgacctacgagctgggaagggagttcttcccgatggaggcccagctttcgaggcttataggccagagcctctgggacgtctcgcgctcgagcaccggaaatttggtggaggcattcctcctgcggaaggcctacaagaggaacgagctcgccccaaacaagcccgacgagagggagctcgcgagacggcgcgggggctacgctggcgggtacgttaaggaaccagagcggggattgtgggacaacattgtgtatttagacttccgctcgtggtatccttcaatcatcataacccacaacgtctcgccggataccctcaaccgcgagggctgtaaagagtacgacgtcgcccctgaggttggacacaagttctgcaaggacttccccggcttcataccaagcctcctgggagatttgctcgaggaggcgagcaagatagagcggaagatgaaggcaacggttgacccgctggagaagaaactcctcgtgtacaggcagtggcttataaaaatcctcgccaacagcttcgctggctactacggctacgccaaggcccggtggtactgcaaggagtgcgccgagagcgttacggcctggggaagggagtatatagaaatggttatccgggaactcgaagaaaaattcggttttaaagttctctatgccgatacagacggtctccatgctaccattcccggagcagacgctgaaacagtcaagaaaaaagcaaaggagttcttaaaatacattaatccaaaactgcccggcctgctcgaacttgagtacgagggcttctacgtgaggggcttcttcgtcacgaagaagaagtacgctgtgatagacgaggagggcaagataaccacgaggggtcttgagattgtgaggcgcgactggagcgagatagcgaaggagacccaggccagggtcttagaggcgatactcaagcacggtgacgtcgaggaggccgttaggatagtcaaggaagtgacggaaaagctgagcaagtatgaggtcccgcccgagaagctggtaatccacgagcagataacgcgcgatttgagggattacaaagccaccggcccgcacgttgccgttgcgaagaggctcgcggcgcgtggagtgaaaatccggcccggcacggtgataagctacatcgtcctaaagggctctggaaggataggcgacagggcgattccagctgatgagttcgacccgacgaagcaccgctacgatgcggaatactacatcgagaaccaggttctcccggcggtggagaggattctaaaagccttcggctatcggaaggaggatttgcgctaccagaagacgaagcaggtcggctcgggcgcgtggctgaaggtgaaggggaagaagggtaccgaagcttacgtagaacaaaaactcatctcagaagaggatctgaatagcgccgtcgaccatcatcatcatcatcattga

SEQ ID NO: 704 - protein, 802 aa, Artificial Sequence
  Description of Artificial Sequence:Thermococcus species 9degreesN-7 mutant DNA polymerase, 9degreesN mutant
MILDTDYITENGKPVIRVFKKENGEFKIEYDRTFEPYFYALLKDDSAIEDVKKVTAKRHGTVVKVKRAEKVQKKFLGRPIEVWKLYFNHPQDVPAIRDRIRAHPAVVDIYEYDIPFAKRYLIDKGLIPMEGDEELTMLAFAIATLYHEGEEFGTGPILMISYADGSEARVITWKKIDLPYVDVVSTEKEMIKRFLRVVREKDPDVLITYNGDNFDFAYLKKRCEELGIKFTLGRDGSEPKIQRMGDRFAVEVKGRIHFDLYPVIRRTINLPTYTLEAVYEAVFGKPKEKVYAEEIAQAWESGEGLERVARYSMEDAKVTYELGREFFPMEAQLSRLIGQSLWDVSRSSTGNLVEAFLLRKAYKRNELAPNKPDERELARRRGGYAGGYVKEPERGLWDNIVYLDFRSWYPSIIITHNVSPDTLNREGCKEYDVAPEVGHKFCKDFPGFIPSLLGDLLEEASKIERKMKATVDPLEKKLLVYRQWLIKILANSFAGYYGYAKARWYCKECAESVTAWGREYIEMVIRELEEKFGFKVLYADTDGLHATIPGADAETVKKKAKEFLKYINPKLPGLLELEYEGFYVRGFFVTKKKYAVIDEEGKITTRGLEIVRRDWSEIAKETQARVLEAILKHGDVEEAVRIVKEVTEKLSKYEVPPEKLVIHEQITRDLRDYKATGPHVAVAKRLAARGVKIRPGTVISYIVLKGSGRIGDRAIPADEFDPTKHRYDAEYYIENQVLPAVERILKAFGYRKEDLRYQKTKQVGSGAWLKVKGKKGTEAYVEQKLISEEDLNSAVDHHHHHH

SEQ ID NO: 705 - DNA, 2409 bp, Artificial Sequence
  Description of Artificial Sequence:Thermococcus species 9degreesN-7 mutant DNA polymerase, 9degreesN mutant
atgattctcgataccgactacatcaccgagaacgggaagcccgtgataagggtcttcaagaaggagaacggcgagtttaaaatcgagtacgacagaaccttcgagccctacttctacgcccttctgaaggacgattctgcgatagaggacgtcaagaaggtaaccgcaaagaggcacggaacggttgtcaaggtgaagcgcgccgagaaggtgcagaagaagttcctcggcaggccgatagaggtctggaagctctacttcaaccatcctcaggacgtcccggcgattcgagacaggatacgcgcccaccccgctgtcgttgacatctacgagtacgacatacccttcgccaagcgctacctcatcgacaagggcctgattccgatggagggcgacgaggagcttacgatgctcgccttcgcgatcgcaaccctctatcacgagggcgaggagttcggaaccgggccgattctcatgataagctacgccgacgggagcgaggcgagggtgataacctggaagaagattgaccttccgtacgttgacgtcgtctcgaccgagaaggagatgattaagcgcttcctccgcgtcgtcagggagaaggaccccgacgtgctcatcacctacaacggcgacaacttcgacttcgcctacctgaagaagcgctgtgaggaactcggaataaagttcacactcggcagggacgggagcgagccgaagatacagcgaatgggcgaccgctttgccgttgaggtgaagggcaggattcacttcgacctctaccccgtcataaggcgcacgataaacctcccgacctacacccttgaggccgtttacgaggccgtctttggaaagcccaaggagaaggtttacgcagaggagatagcgcaggcctgggagagcggggagggccttgaaagggttgcaagatactcgatggaggacgctaaggtgacctacgagctgggaagggagttcttcccgatggaggcccagctttcgaggcttataggccagagcctctgggacgtctcgcgctcgagcaccggaaatttggtggaggcattcctcctgcggaaggcctacaagaggaacgagctcgccccaaacaagcccgacgagagggagctcgcgagacggcgcgggggctacgctggcgggtacgttaaggaaccagagcggggattgtgggacaacattgtgtatttagacttccgctcgtggtatccttcaatcatcataacccacaacgtctcgccggataccctcaaccgcgagggctgtaaagagtacgacgtcgcccctgaggttggacacaagttctgcaaggacttccccggcttcataccaagcctcctgggagatttgctcgaggaggcgagcaagatagagcggaagatgaaggcaacggttgacccgctggagaagaaactcctcgtgtacaggcagtggcttataaaaatcctcgccaacagcttcgagggctactacggctacgccaaggcccggtggtactgcaaggagtgcgccgagagcgttacggcctggggaagggagtatatagaaatggttatccgggaactcgaagaaaaattcggttttaaagttctctatgccgatacagacggtctccatgctaccattcccggagcagacgctgaaacagtcaagaaaaaagcaaaggagttcttaaaatacattaatccaaaactgcccggcctgctcgaacttgagtacgagggcttctacgtgaggggcttcttcgtcacgaagaagaagtacgctgtgatagacgaggagggcaagataaccacgaggggtcttgagattgtgaggcgcgactggagcgagatagcgaaggagacccaggccagggtcttagaggcgatactcaagcacggtgacgtcgaggaggccgttaggatagtcaaggaagtgacggaaaagctgagcaagtatgaggtcccgcccgagaagctggtaatccacgagcagataacgcgcgatttgagggattacaaagccaccggcccgcacgttgccgttgcgaagaggctcgcggcgcgtggagtgaaaatccggcccggcacggtgataagctacatcgtcctaaagggctctggaaggataggcgacagggcgattccagctgatgagttcgacccgacgaagcaccgctacgatgcggaatactacatcgagaaccaggttctcccggcggtggagaggattctaaaagccttcggctatcggaaggaggatttgcgctaccagaagacgaagcaggtcggctcgggcgcgtggctgaaggtgaaggggaagaagggtaccgaagcttacgtagaacaaaaactcatctcagaagaggatctgaatagcgccgtcgaccatcatcatcatcatcattga

SEQ ID NO: 706 - protein, 802 aa, Artificial Sequence
  Description of Artificial Sequence:Thermococcus species 9degreesN-7 mutant DNA polymerase, 9degreesN mutant
MILDTDYITENGKPVIRVFKKENGEFKIEYDRTFEPYFYALLKDDSAIEDVKKVTAKRHGTVVKVKRAEKVQKKFLGRPIEVWKLYFNHPQDVPAIRDRIRAHPAVVDIYEYDIPFAKRYLIDKGLIPMEGDEELTMLAFAIATLYHEGEEFGTGPILMISYADGSEARVITWKKIDLPYVDVVSTEKEMIKRFLRVVREKDPDVLITYNGDNFDFAYLKKRCEELGIKFTLGRDGSEPKIQRMGDRFAVEVKGRIHFDLYPVIRRTINLPTYTLEAVYEAVFGKPKEKVYAEEIAQAWESGEGLERVARYSMEDAKVTYELGREFFPMEAQLSRLIGQSLWDVSRSSTGNLVEAFLLRKAYKRNELAPNKPDERELARRRGGYAGGYVKEPERGLWDNIVYLDFRSWYPSIIITHNVSPDTLNREGCKEYDVAPEVGHKFCKDFPGFIPSLLGDLLEEASKIERKMKATVDPLEKKLLVYRQWLIKILANSFEGYYGYAKARWYCKECAESVTAWGREYIEMVIRELEEKFGFKVLYADTDGLHATIPGADAETVKKKAKEFLKYINPKLPGLLELEYEGFYVRGFFVTKKKYAVIDEEGKITTRGLEIVRRDWSEIAKETQARVLEAILKHGDVEEAVRIVKEVTEKLSKYEVPPEKLVIHEQITRDLRDYKATGPHVAVAKRLAARGVKIRPGTVISYIVLKGSGRIGDRAIPADEFDPTKHRYDAEYYIENQVLPAVERILKAFGYRKEDLRYQKTKQVGSGAWLKVKGKKGTEAYVEQKLISEEDLNSAVDHHHHHH

SEQ ID NO: 707 - DNA, 2409 bp, Artificial Sequence
  Description of Artificial Sequence:Thermococcus species 9degreesN-7 mutant DNA polymerase, 9degreesN mutant
atgattctcgataccgactacatcaccgagaacgggaagcccgtgataagggtcttcaagaaggagaacggcgagtttaaaatcgagtacgacagaaccttcgagccctacttctacgcccttctgaaggacgattctgcgatagaggacgtcaagaaggtaaccgcaaagaggcacggaacggttgtcaaggtgaagcgcgccgagaaggtgcagaagaagttcctcggcaggccgatagaggtctggaagctctacttcaaccatcctcaggacgtcccggcgattcgagacaggatacgcgcccaccccgctgtcgttgacatctacgagtacgacatacccttcgccaagcgctacctcatcgacaagggcctgattccgatggagggcgacgaggagcttacgatgctcgccttcgcgatcgcaaccctctatcacgagggcgaggagttcggaaccgggccgattctcatgataagctacgccgacgggagcgaggcgagggtgataacctggaagaagattgaccttccgtacgttgacgtcgtctcgaccgagaaggagatgattaagcgcttcctccgcgtcgtcagggagaaggaccccgacgtgctcatcacctacaacggcgacaacttcgacttcgcctacctgaagaagcgctgtgaggaactcggaataaagttcacactcggcagggacgggagcgagccgaagatacagcgaatgggcgaccgctttgccgttgaggtgaagggcaggattcacttcgacctctaccccgtcataaggcgcacgataaacctcccgacctacacccttgaggccgtttacgaggccgtctttggaaagcccaaggagaaggtttacgcagaggagatagcgcaggcctgggagagcggggagggccttgaaagggttgcaagatactcgatggaggacgctaaggtgacctacgagctgggaagggagttcttcccgatggaggcccagctttcgaggcttataggccagagcctctgggacgtctcgcgctcgagcaccggaaatttggtggaggcattcctcctgcggaaggcctacaagaggaacgagctcgccccaaacaagcccgacgagagggagctcgcgagacggcgcgggggctacgctggcgggtacgttaaggaaccagagcggggattgtgggacaacattgtgtatttagacttccgctcgtggtatccttcaatcatcataacccacaacgtctcgccggataccctcaaccgcgagggctgtaaagagtacgacgtcgcccctgaggttggacacaagttctgcaaggacttccccggcttcataccaagcctcctgggagatttgctcgaggaggcgagcaagatagagcggaagatgaaggcaacggttgacccgctggagaagaaactcctcgtgtacaggcagtggcttataaaaatcctcgccaacagcttcaagggctactacggctacgccaaggcccggtggtactgcaaggagtgcgccgagagcgttacggcctggggaagggagtatatagaaatggttatccgggaactcgaagaaaaattcggttttaaagttctctatgccgatacagacggtctccatgctaccattcccggagcagacgctgaaacagtcaagaaaaaagcaaaggagttcttaaaatacattaatccaaaactgcccggcctgctcgaacttgagtacgagggcttctacgtgaggggcttcttcgtcacgaagaagaagtacgctgtgatagacgaggagggcaagataaccacgaggggtcttgagattgtgaggcgcgactggagcgagatagcgaaggagacccaggccagggtcttagaggcgatactcaagcacggtgacgtcgaggaggccgttaggatagtcaaggaagtgacggaaaagctgagcaagtatgaggtcccgcccgagaagctggtaatccacgagcagataacgcgcgatttgagggattacaaagccaccggcccgcacgttgccgttgcgaagaggctcgcggcgcgtggagtgaaaatccggcccggcacggtgataagctacatcgtcctaaagggctctggaaggataggcgacagggcgattccagctgatgagttcgacccgacgaagcaccgctacgatgcggaatactacatcgagaaccaggttctcccggcggtggagaggattctaaaagccttcggctatcggaaggaggatttgcgctaccagaagacgaagcaggtcggctcgggcgcgtggctgaaggtgaaggggaagaagggtaccgaagcttacgtagaacaaaaactcatctcagaagaggatctgaatagcgccgtcgaccatcatcatcatcatcattga

SEQ ID NO: 708 - protein, 802 aa, Artificial Sequence
  Description of Artificial Sequence:Thermococcus species 9degreesN-7 mutant DNA polymerase, 9degreesN mutant
MILDTDYITENGKPVIRVFKKENGEFKIEYDRTFEPYFYALLKDDSAIEDVKKVTAKRHGTVVKVKRAEKVQKKFLGRPIEVWKLYFNHPQDVPAIRDRIRAHPAVVDIYEYDIPFAKRYLIDKGLIPMEGDEELTMLAFAIATLYHEGEEFGTGPILMISYADGSEARVITWKKIDLPYVDVVSTEKEMIKRFLRVVREKDPDVLITYNGDNFDFAYLKKRCEELGIKFTLGRDGSEPKIQRMGDRFAVEVKGRIHFDLYPVIRRTINLPTYTLEAVYEAVFGKPKEKVYAEEIAQAWESGEGLERVARYSMEDAKVTYELGREFFPMEAQLSRLIGQSLWDVSRSSTGNLVEAFLLRKAYKRNELAPNKPDERELARRRGGYAGGYVKEPERGLWDNIVYLDFRSWYPSIIITHNVSPDTLNREGCKEYDVAPEVGHKFCKDFPGFIPSLLGDLLEEASKIERKMKATVDPLEKKLLVYRQWLIKILANSFKGYYGYAKARWYCKECAESVTAWGREYIEMVIRELEEKFGFKVLYADTDGLHATIPGADAETVKKKAKEFLKYINPKLPGLLELEYEGFYVRGFFVTKKKYAVIDEEGKITTRGLEIVRRDWSEIAKETQARVLEAILKHGDVEEAVRIVKEVTEKLSKYEVPPEKLVIHEQITRDLRDYKATGPHVAVAKRLAARGVKIRPGTVISYIVLKGSGRIGDRAIPADEFDPTKHRYDAEYYIENQVLPAVERILKAFGYRKEDLRYQKTKQVGSGAWLKVKGKKGTEAYVEQKLISEEDLNSAVDHHHHHH

SEQ ID NO: 709 - DNA, 2409 bp, Artificial Sequence
  Description of Artificial Sequence:Thermococcus species 9degreesN-7 mutant DNA polymerase, 9degreesN mutant
atgattctcgataccgactacatcaccgagaacgggaagcccgtgataagggtcttcaagaaggagaacggcgagtttaaaatcgagtacgacagaaccttcgagccctacttctacgcccttctgaaggacgattctgcgatagaggacgtcaagaaggtaaccgcaaagaggcacggaacggttgtcaaggtgaagcgcgccgagaaggtgcagaagaagttcctcggcaggccgatagaggtctggaagctctacttcaaccatcctcaggacgtcccggcgattcgagacaggatacgcgcccaccccgctgtcgttgacatctacgagtacgacatacccttcgccaagcgctacctcatcgacaagggcctgattccgatggagggcgacgaggagcttacgatgctcgccttcgcgatcgcaaccctctatcacgagggcgaggagttcggaaccgggccgattctcatgataagctacgccgacgggagcgaggcgagggtgataacctggaagaagattgaccttccgtacgttgacgtcgtctcgaccgagaaggagatgattaagcgcttcctccgcgtcgtcagggagaaggaccccgacgtgctcatcacctacaacggcgacaacttcgacttcgcctacctgaagaagcgctgtgaggaactcggaataaagttcacactcggcagggacgggagcgagccgaagatacagcgaatgggcgaccgctttgccgttgaggtgaagggcaggattcacttcgacctctaccccgtcataaggcgcacgataaacctcccgacctacacccttgaggccgtttacgaggccgtctttggaaagcccaaggagaaggtttacgcagaggagatagcgcaggcctgggagagcggggagggccttgaaagggttgcaagatactcgatggaggacgctaaggtgacctacgagctgggaagggagttcttcccgatggaggcccagctttcgaggcttataggccagagcctctgggacgtctcgcgctcgagcaccggaaatttggtggaggcattcctcctgcggaaggcctacaagaggaacgagctcgccccaaacaagcccgacgagagggagctcgcgagacggcgcgggggctacgctggcgggtacgttaaggaaccagagcggggattgtgggacaacattgtgtatttagacttccgctcgtggtatccttcaatcatcataacccacaacgtctcgccggataccctcaaccgcgagggctgtaaagagtacgacgtcgcccctgaggttggacacaagttctgcaaggacttccccggcttcataccaagcctcctgggagatttgctcgaggaggcgagcaagatagagcggaagatgaaggcaacggttgacccgctggagaagaaactcctcgtgtacaggcagtggcttataaaaatcctcgccaacagcttctgcggctactacggctacgccaaggcccggtggtactgcaaggagtgcgccgagagcgttacggcctggggaagggagtatatagaaatggttatccgggaactcgaagaaaaattcggttttaaagttctctatgccgatacagacggtctccatgctaccattcccggagcagacgctgaaacagtcaagaaaaaagcaaaggagttcttaaaatacattaatccaaaactgcccggcctgctcgaacttgagtacgagggcttctacgtgaggggcttcttcgtcacgaagaagaagtacgctgtgatagacgaggagggcaagataaccacgaggggtcttgagattgtgaggcgcgactggagcgagatagcgaaggagacccaggccagggtcttagaggcgatactcaagcacggtgacgtcgaggaggccgttaggatagtcaaggaagtgacggaaaagctgagcaagtatgaggtcccgcccgagaagctggtaatccacgagcagataacgcgcgatttgagggattacaaagccaccggcccgcacgttgccgttgcgaagaggctcgcggcgcgtggagtgaaaatccggcccggcacggtgataagctacatcgtcctaaagggctctggaaggataggcgacagggcgattccagctgatgagttcgacccgacgaagcaccgctacgatgcggaatactacatcgagaaccaggttctcccggcggtggagaggattctaaaagccttcggctatcggaaggaggatttgcgctaccagaagacgaagcaggtcggctcgggcgcgtggctgaaggtgaaggggaagaagggtaccgaagcttacgtagaacaaaaactcatctcagaagaggatctgaatagcgccgtcgaccatcatcatcatcatcattga

SEQ ID NO: 710 - protein, 802 aa, Artificial Sequence
  Description of Artificial Sequence:Thermococcus species 9degreesN-7 mutant DNA polymerase, 9degreesN mutant
MILDTDYITENGKPVIRVFKKENGEFKIEYDRTFEPYFYALLKDDSAIEDVKKVTAKRHGTVVKVKRAEKVQKKFLGRPIEVWKLYFNHPQDVPAIRDRIRAHPAVVDIYEYDIPFAKRYLIDKGLIPMEGDEELTMLAFAIATLYHEGEEFGTGPILMISYADGSEARVITWKKIDLPYVDVVSTEKEMIKRFLRVVREKDPDVLITYNGDNFDFAYLKKRCEELGIKFTLGRDGSEPKIQRMGDRFAVEVKGRIHFDLYPVIRRTINLPTYTLEAVYEAVFGKPKEKVYAEEIAQAWESGEGLERVARYSMEDAKVTYELGREFFPMEAQLSRLIGQSLWDVSRSSTGNLVEAFLLRKAYKRNELAPNKPDERELARRRGGYAGGYVKEPERGLWDNIVYLDFRSWYPSIIITHNVSPDTLNREGCKEYDVAPEVGHKFCKDFPGFIPSLLGDLLEEASKIERKMKATVDPLEKKLLVYRQWLIKILANSFCGYYGYAKARWYCKECAESVTAWGREYIEMVIRELEEKFGFKVLYADTDGLHATIPGADAETVKKKAKEFLKYINPKLPGLLELEYEGFYVRGFFVTKKKYAVIDEEGKITTRGLEIVRRDWSEIAKETQARVLEAILKHGDVEEAVRIVKEVTEKLSKYEVPPEKLVIHEQITRDLRDYKATGPHVAVAKRLAARGVKIRPGTVISYIVLKGSGRIGDRAIPADEFDPTKHRYDAEYYIENQVLPAVERILKAFGYRKEDLRYQKTKQVGSGAWLKVKGKKGTEAYVEQKLISEEDLNSAVDHHHHHH

SEQ ID NO: 711 - DNA, 2409 bp, Artificial Sequence
  Description of Artificial Sequence:Thermococcus species 9degreesN-7 mutant DNA polymerase, 9degreesN mutant
atgattctcgataccgactacatcaccgagaacgggaagcccgtgataagggtcttcaagaaggagaacggcgagtttaaaatcgagtacgacagaaccttcgagccctacttctacgcccttctgaaggacgattctgcgatagaggacgtcaagaaggtaaccgcaaagaggcacggaacggttgtcaaggtgaagcgcgccgagaaggtgcagaagaagttcctcggcaggccgatagaggtctggaagctctacttcaaccatcctcaggacgtcccggcgattcgagacaggatacgcgcccaccccgctgtcgttgacatctacgagtacgacatacccttcgccaagcgctacctcatcgacaagggcctgattccgatggagggcgacgaggagcttacgatgctcgccttcgcgatcgcaaccctctatcacgagggcgaggagttcggaaccgggccgattctcatgataagctacgccgacgggagcgaggcgagggtgataacctggaagaagattgaccttccgtacgttgacgtcgtctcgaccgagaaggagatgattaagcgcttcctccgcgtcgtcagggagaaggaccccgacgtgctcatcacctacaacggcgacaacttcgacttcgcctacctgaagaagcgctgtgaggaactcggaataaagttcacactcggcagggacgggagcgagccgaagatacagcgaatgggcgaccgctttgccgttgaggtgaagggcaggattcacttcgacctctaccccgtcataaggcgcacgataaacctcccgacctacacccttgaggccgtttacgaggccgtctttggaaagcccaaggagaaggtttacgcagaggagatagcgcaggcctgggagagcggggagggccttgaaagggttgcaagatactcgatggaggacgctaaggtgacctacgagctgggaagggagttcttcccgatggaggcccagctttcgaggcttataggccagagcctctgggacgtctcgcgctcgagcaccggaaatttggtggaggcattcctcctgcggaaggcctacaagaggaacgagctcgccccaaacaagcccgacgagagggagctcgcgagacggcgcgggggctacgctggcgggtacgttaaggaaccagagcggggattgtgggacaacattgtgtatttagacttccgctcgtggtatccttcaatcatcataacccacaacgtctcgccggataccctcaaccgcgagggctgtaaagagtacgacgtcgcccctgaggttggacacaagttctgcaaggacttccccggcttcataccaagcctcctgggagatttgctcgaggaggcgagcaagatagagcggaagatgaaggcaacggttgacccgctggagaagaaactcctcgtgtacaggcagtggcttataaaaatcctcgccaacagcttccacggctactacggctacgccaaggcccggtggtactgcaaggagtgcgccgagagcgttacggcctggggaagggagtatatagaaatggttatccgggaactcgaagaaaaattcggttttaaagttctctatgccgatacagacggtctccatgctaccattcccggagcagacgctgaaacagtcaagaaaaaagcaaaggagttcttaaaatacattaatccaaaactgcccggcctgctcgaacttgagtacgagggcttctacgtgaggggcttcttcgtcacgaagaagaagtacgctgtgatagacgaggagggcaagataaccacgaggggtcttgagattgtgaggcgcgactggagcgagatagcgaaggagacccaggccagggtcttagaggcgatactcaagcacggtgacgtcgaggaggccgttaggatagtcaaggaagtgacggaaaagctgagcaagtatgaggtcccgcccgagaagctggtaatccacgagcagataacgcgcgatttgagggattacaaagccaccggcccgcacgttgccgttgcgaagaggctcgcggcgcgtggagtgaaaatccggcccggcacggtgataagctacatcgtcctaaagggctctggaaggataggcgacagggcgattccagctgatgagttcgacccgacgaagcaccgctacgatgcggaatactacatcgagaaccaggttctcccggcggtggagaggattctaaaagccttcggctatcggaaggaggatttgcgctaccagaagacgaagcaggtcggctcgggcgcgtggctgaaggtgaaggggaagaagggtaccgaagcttacgtagaacaaaaactcatctcagaagaggatctgaatagcgccgtcgaccatcatcatcatcatcattga

SEQ ID NO: 712 - protein, 802 aa, Artificial Sequence
  Description of Artificial Sequence:Thermococcus species 9degreesN-7 mutant DNA polymerase, 9degreesN mutant
MILDTDYITENGKPVIRVFKKENGEFKIEYDRTFEPYFYALLKDDSAIEDVKKVTAKRHGTVVKVKRAEKVQKKFLGRPIEVWKLYFNHPQDVPAIRDRIRAHPAVVDIYEYDIPFAKRYLIDKGLIPMEGDEELTMLAFAIATLYHEGEEFGTGPILMISYADGSEARVITWKKIDLPYVDVVSTEKEMIKRFLRVVREKDPDVLITYNGDNFDFAYLKKRCEELGIKFTLGRDGSEPKIQRMGDRFAVEVKGRIHFDLYPVIRRTINLPTYTLEAVYEAVFGKPKEKVYAEEIAQAWESGEGLERVARYSMEDAKVTYELGREFFPMEAQLSRLIGQSLWDVSRSSTGNLVEAFLLRKAYKRNELAPNKPDERELARRRGGYAGGYVKEPERGLWDNIVYLDFRSWYPSIIITHNVSPDTLNREGCKEYDVAPEVGHKFCKDFPGFIPSLLGDLLEEASKIERKMKATVDPLEKKLLVYRQWLIKILANSFHGYYGYAKARWYCKECAESVTAWGREYIEMVIRELEEKFGFKVLYADTDGLHATIPGADAETVKKKAKEFLKYINPKLPGLLELEYEGFYVRGFFVTKKKYAVIDEEGKITTRGLEIVRRDWSEIAKETQARVLEAILKHGDVEEAVRIVKEVTEKLSKYEVPPEKLVIHEQITRDLRDYKATGPHVAVAKRLAARGVKIRPGTVISYIVLKGSGRIGDRAIPADEFDPTKHRYDAEYYIENQVLPAVERILKAFGYRKEDLRYQKTKQVGSGAWLKVKGKKGTEAYVEQKLISEEDLNSAVDHHHHHH

SEQ ID NO: 713 - DNA, 2409 bp, Artificial Sequence
  Description of Artificial Sequence:Thermococcus species 9degreesN-7 mutant DNA polymerase, 9degreesN mutant
atgattctcgataccgactacatcaccgagaacgggaagcccgtgataagggtcttcaagaaggagaacggcgagtttaaaatcgagtacgacagaaccttcgagccctacttctacgcccttctgaaggacgattctgcgatagaggacgtcaagaaggtaaccgcaaagaggcacggaacggttgtcaaggtgaagcgcgccgagaaggtgcagaagaagttcctcggcaggccgatagaggtctggaagctctacttcaaccatcctcaggacgtcccggcgattcgagacaggatacgcgcccaccccgctgtcgttgacatctacgagtacgacatacccttcgccaagcgctacctcatcgacaagggcctgattccgatggagggcgacgaggagcttacgatgctcgccttcgcgatcgcaaccctctatcacgagggcgaggagttcggaaccgggccgattctcatgataagctacgccgacgggagcgaggcgagggtgataacctggaagaagattgaccttccgtacgttgacgtcgtctcgaccgagaaggagatgattaagcgcttcctccgcgtcgtcagggagaaggaccccgacgtgctcatcacctacaacggcgacaacttcgacttcgcctacctgaagaagcgctgtgaggaactcggaataaagttcacactcggcagggacgggagcgagccgaagatacagcgaatgggcgaccgctttgccgttgaggtgaagggcaggattcacttcgacctctaccccgtcataaggcgcacgataaacctcccgacctacacccttgaggccgtttacgaggccgtctttggaaagcccaaggagaaggtttacgcagaggagatagcgcaggcctgggagagcggggagggccttgaaagggttgcaagatactcgatggaggacgctaaggtgacctacgagctgggaagggagttcttcccgatggaggcccagctttcgaggcttataggccagagcctctgggacgtctcgcgctcgagcaccggaaatttggtggaggcattcctcctgcggaaggcctacaagaggaacgagctcgccccaaacaagcccgacgagagggagctcgcgagacggcgcgggggctacgctggcgggtacgttaaggaaccagagcggggattgtgggacaacattgtgtatttagacttccgctcgtggtatccttcaatcatcataacccacaacgtctcgccggataccctcaaccgcgagggctgtaaagagtacgacgtcgcccctgaggttggacacaagttctgcaaggacttccccggcttcataccaagcctcctgggagatttgctcgaggaggcgagcaagatagagcggaagatgaaggcaacggttgacccgctggagaagaaactcctcgtgtacaggcagtggcttataaaaatcctcgccaacagcttcgatggctactacggctacgccaaggcccggtggtactgcaaggagtgcgccgagagcgttacggcctggggaagggagtatatagaaatggttatccgggaactcgaagaaaaattcggttttaaagttctctatgccgatacagacggtctccatgctaccattcccggagcagacgctgaaacagtcaagaaaaaagcaaaggagttcttaaaatacattaatccaaaactgcccggcctgctcgaacttgagtacgagggcttctacgtgaggggcttcttcgtcacgaagaagaagtacgctgtgatagacgaggagggcaagataaccacgaggggtcttgagattgtgaggcgcgactggagcgagatagcgaaggagacccaggccagggtcttagaggcgatactcaagcacggtgacgtcgaggaggccgttaggatagtcaaggaagtgacggaaaagctgagcaagtatgaggtcccgcccgagaagctggtaatccacgagcagataacgcgcgatttgagggattacaaagccaccggcccgcacgttgccgttgcgaagaggctcgcggcgcgtggagtgaaaatccggcccggcacggtgataagctacatcgtcctaaagggctctggaaggataggcgacagggcgattccagctgatgagttcgacccgacgaagcaccgctacgatgcggaatactacatcgagaaccaggttctcccggcggtggagaggattctaaaagccttcggctatcggaaggaggatttgcgctaccagaagacgaagcaggtcggctcgggcgcgtggctgaaggtgaaggggaagaagggtaccgaagcttacgtagaacaaaaactcatctcagaagaggatctgaatagcgccgtcgaccatcatcatcatcatcattga

SEQ ID NO: 714 - protein, 802 aa, Artificial Sequence
  Description of Artificial Sequence:Thermococcus species 9degreesN-7 mutant DNA polymerase, 9degreesN mutant
MILDTDYITENGKPVIRVFKKENGEFKIEYDRTFEPYFYALLKDDSAIEDVKKVTAKRHGTVVKVKRAEKVQKKFLGRPIEVWKLYFNHPQDVPAIRDRIRAHPAVVDIYEYDIPFAKRYLIDKGLIPMEGDEELTMLAFAIATLYHEGEEFGTGPILMISYADGSEARVITWKKIDLPYVDVVSTEKEMIKRFLRVVREKDPDVLITYNGDNFDFAYLKKRCEELGIKFTLGRDGSEPKIQRMGDRFAVEVKGRIHFDLYPVIRRTINLPTYTLEAVYEAVFGKPKEKVYAEEIAQAWESGEGLERVARYSMEDAKVTYELGREFFPMEAQLSRLIGQSLWDVSRSSTGNLVEAFLLRKAYKRNELAPNKPDERELARRRGGYAGGYVKEPERGLWDNIVYLDFRSWYPSIIITHNVSPDTLNREGCKEYDVAPEVGHKFCKDFPGFIPSLLGDLLEEASKIERKMKATVDPLEKKLLVYRQWLIKILANSFDGYYGYAKARWYCKECAESVTAWGREYIEMVIRELEEKFGFKVLYADTDGLHATIPGADAETVKKKAKEFLKYINPKLPGLLELEYEGFYVRGFFVTKKKYAVIDEEGKITTRGLEIVRRDWSEIAKETQARVLEAILKHGDVEEAVRIVKEVTEKLSKYEVPPEKLVIHEQITRDLRDYKATGPHVAVAKRLAARGVKIRPGTVISYIVLKGSGRIGDRAIPADEFDPTKHRYDAEYYIENQVLPAVERILKAFGYRKEDLRYQKTKQVGSGAWLKVKGKKGTEAYVEQKLISEEDLNSAVDHHHHHH

SEQ ID NO: 715 - DNA, 2409 bp, Artificial Sequence
  Description of Artificial Sequence:Thermococcus species 9degreesN-7 mutant DNA polymerase, 9degreesN mutant
atgattctcgataccgactacatcaccgagaacgggaagcccgtgataagggtcttcaagaaggagaacggcgagtttaaaatcgagtacgacagaaccttcgagccctacttctacgcccttctgaaggacgattctgcgatagaggacgtcaagaaggtaaccgcaaagaggcacggaacggttgtcaaggtgaagcgcgccgagaaggtgcagaagaagttcctcggcaggccgatagaggtctggaagctctacttcaaccatcctcaggacgtcccggcgattcgagacaggatacgcgcccaccccgctgtcgttgacatctacgagtacgacatacccttcgccaagcgctacctcatcgacaagggcctgattccgatggagggcgacgaggagcttacgatgctcgccttcgcgatcgcaaccctctatcacgagggcgaggagttcggaaccgggccgattctcatgataagctacgccgacgggagcgaggcgagggtgataacctggaagaagattgaccttccgtacgttgacgtcgtctcgaccgagaaggagatgattaagcgcttcctccgcgtcgtcagggagaaggaccccgacgtgctcatcacctacaacggcgacaacttcgacttcgcctacctgaagaagcgctgtgaggaactcggaataaagttcacactcggcagggacgggagcgagccgaagatacagcgaatgggcgaccgctttgccgttgaggtgaagggcaggattcacttcgacctctaccccgtcataaggcgcacgataaacctcccgacctacacccttgaggccgtttacgaggccgtctttggaaagcccaaggagaaggtttacgcagaggagatagcgcaggcctgggagagcggggagggccttgaaagggttgcaagatactcgatggaggacgctaaggtgacctacgagctgggaagggagttcttcccgatggaggcccagctttcgaggcttataggccagagcctctgggacgtctcgcgctcgagcaccggaaatttggtggaggcattcctcctgcggaaggcctacaagaggaacgagctcgccccaaacaagcccgacgagagggagctcgcgagacggcgcgggggctacgctggcgggtacgttaaggaaccagagcggggattgtgggacaacattgtgtatttagacttccgctcgtggtatccttcaatcatcataacccacaacgtctcgccggataccctcaaccgcgagggctgtaaagagtacgacgtcgcccctgaggttggacacaagttctgcaaggacttccccggcttcataccaagcctcctgggagatttgctcgaggaggcgagcaagatagagcggaagatgaaggcaacggttgacccgctggagaagaaactcctcgtgtacaggcagtggcttataaaaatcctcgccaacagcttctacggctactttggctacgccaaggcccggtggtactgcaaggagtgcgccgagagcgttacggcctggggaagggagtatatagaaatggttatccgggaactcgaagaaaaattcggttttaaagttctctatgccgatacagacggtctccatgctaccattcccggagcagacgctgaaacagtcaagaaaaaagcaaaggagttcttaaaatacattaatccaaaactgcccggcctgctcgaacttgagtacgagggcttctacgtgaggggcttcttcgtcacgaagaagaagtacgctgtgatagacgaggagggcaagataaccacgaggggtcttgagattgtgaggcgcgactggagcgagatagcgaaggagacccaggccagggtcttagaggcgatactcaagcacggtgacgtcgaggaggccgttaggatagtcaaggaagtgacggaaaagctgagcaagtatgaggtcccgcccgagaagctggtaatccacgagcagataacgcgcgatttgagggattacaaagccaccggcccgcacgttgccgttgcgaagaggctcgcggcgcgtggagtgaaaatccggcccggcacggtgataagctacatcgtcctaaagggctctggaaggataggcgacagggcgattccagctgatgagttcgacccgacgaagcaccgctacgatgcggaatactacatcgagaaccaggttctcccggcggtggagaggattctaaaagccttcggctatcggaaggaggatttgcgctaccagaagacgaagcaggtcggctcgggcgcgtggctgaaggtgaaggggaagaagggtaccgaagcttacgtagaacaaaaactcatctcagaagaggatctgaatagcgccgtcgaccatcatcatcatcatcattga

SEQ ID NO: 716 - protein, 802 aa, Artificial Sequence
  Description of Artificial Sequence:Thermococcus species 9degreesN-7 mutant DNA polymerase, 9degreesN mutant
MILDTDYITENGKPVIRVFKKENGEFKIEYDRTFEPYFYALLKDDSAIEDVKKVTAKRHGTVVKVKRAEKVQKKFLGRPIEVWKLYFNHPQDVPAIRDRIRAHPAVVDIYEYDIPFAKRYLIDKGLIPMEGDEELTMLAFAIATLYHEGEEFGTGPILMISYADGSEARVITWKKIDLPYVDVVSTEKEMIKRFLRVVREKDPDVLITYNGDNFDFAYLKKRCEELGIKFTLGRDGSEPKIQRMGDRFAVEVKGRIHFDLYPVIRRTINLPTYTLEAVYEAVFGKPKEKVYAEEIAQAWESGEGLERVARYSMEDAKVTYELGREFFPMEAQLSRLIGQSLWDVSRSSTGNLVEAFLLRKAYKRNELAPNKPDERELARRRGGYAGGYVKEPERGLWDNIVYLDFRSWYPSIIITHNVSPDTLNREGCKEYDVAPEVGHKFCKDFPGFIPSLLGDLLEEASKIERKMKATVDPLEKKLLVYRQWLIKILANSFYGYFGYAKARWYCKECAESVTAWGREYIEMVIRELEEKFGFKVLYADTDGLHATIPGADAETVKKKAKEFLKYINPKLPGLLELEYEGFYVRGFFVTKKKYAVIDEEGKITTRGLEIVRRDWSEIAKETQARVLEAILKHGDVEEAVRIVKEVTEKLSKYEVPPEKLVIHEQITRDLRDYKATGPHVAVAKRLAARGVKIRPGTVISYIVLKGSGRIGDRAIPADEFDPTKHRYDAEYYIENQVLPAVERILKAFGYRKEDLRYQKTKQVGSGAWLKVKGKKGTEAYVEQKLISEEDLNSAVDHHHHHH

SEQ ID NO: 717 - DNA, 2409 bp, Artificial Sequence
  Description of Artificial Sequence:Thermococcus species 9degreesN-7 mutant DNA polymerase, 9degreesN mutant
atgattctcgataccgactacatcaccgagaacgggaagcccgtgataagggtcttcaagaaggagaacggcgagtttaaaatcgagtacgacagaaccttcgagccctacttctacgcccttctgaaggacgattctgcgatagaggacgtcaagaaggtaaccgcaaagaggcacggaacggttgtcaaggtgaagcgcgccgagaaggtgcagaagaagttcctcggcaggccgatagaggtctggaagctctacttcaaccatcctcaggacgtcccggcgattcgagacaggatacgcgcccaccccgctgtcgttgacatctacgagtacgacatacccttcgccaagcgctacctcatcgacaagggcctgattccgatggagggcgacgaggagcttacgatgctcgccttcgcgatcgcaaccctctatcacgagggcgaggagttcggaaccgggccgattctcatgataagctacgccgacgggagcgaggcgagggtgataacctggaagaagattgaccttccgtacgttgacgtcgtctcgaccgagaaggagatgattaagcgcttcctccgcgtcgtcagggagaaggaccccgacgtgctcatcacctacaacggcgacaacttcgacttcgcctacctgaagaagcgctgtgaggaactcggaataaagttcacactcggcagggacgggagcgagccgaagatacagcgaatgggcgaccgctttgccgttgaggtgaagggcaggattcacttcgacctctaccccgtcataaggcgcacgataaacctcccgacctacacccttgaggccgtttacgaggccgtctttggaaagcccaaggagaaggtttacgcagaggagatagcgcaggcctgggagagcggggagggccttgaaagggttgcaagatactcgatggaggacgctaaggtgacctacgagctgggaagggagttcttcccgatggaggcccagctttcgaggcttataggccagagcctctgggacgtctcgcgctcgagcaccggaaatttggtggaggcattcctcctgcggaaggcctacaagaggaacgagctcgccccaaacaagcccgacgagagggagctcgcgagacggcgcgggggctacgctggcgggtacgttaaggaaccagagcggggattgtgggacaacattgtgtatttagacttccgctcgtggtatccttcaatcatcataacccacaacgtctcgccggataccctcaaccgcgagggctgtaaagagtacgacgtcgcccctgaggttggacacaagttctgcaaggacttccccggcttcataccaagcctcctgggagatttgctcgaggaggcgagcaagatagagcggaagatgaaggcaacggttgacccgctggagaagaaactcctcgtgtacaggcagtggcttataaaaatcctcgccaacagcttctacggctaccaaggctacgccaaggcccggtggtactgcaaggagtgcgccgagagcgttacggcctggggaagggagtatatagaaatggttatccgggaactcgaagaaaaattcggttttaaagttctctatgccgatacagacggtctccatgctaccattcccggagcagacgctgaaacagtcaagaaaaaagcaaaggagttcttaaaatacattaatccaaaactgcccggcctgctcgaacttgagtacgagggcttctacgtgaggggcttcttcgtcacgaagaagaagtacgctgtgatagacgaggagggcaagataaccacgaggggtcttgagattgtgaggcgcgactggagcgagatagcgaaggagacccaggccagggtcttagaggcgatactcaagcacggtgacgtcgaggaggccgttaggatagtcaaggaagtgacggaaaagctgagcaagtatgaggtcccgcccgagaagctggtaatccacgagcagataacgcgcgatttgagggattacaaagccaccggcccgcacgttgccgttgcgaagaggctcgcggcgcgtggagtgaaaatccggcccggcacggtgataagctacatcgtcctaaagggctctggaaggataggcgacagggcgattccagctgatgagttcgacccgacgaagcaccgctacgatgcggaatactacatcgagaaccaggttctcccggcggtggagaggattctaaaagccttcggctatcggaaggaggatttgcgctaccagaagacgaagcaggtcggctcgggcgcgtggctgaaggtgaaggggaagaagggtaccgaagcttacgtagaacaaaaactcatctcagaagaggatctgaatagcgccgtcgaccatcatcatcatcatcattga

SEQ ID NO: 718 - protein, 802 aa, Artificial Sequence
  Description of Artificial Sequence:Thermococcus species 9degreesN-7 mutant DNA polymerase, 9degreesN mutant
MILDTDYITENGKPVIRVFKKENGEFKIEYDRTFEPYFYALLKDDSAIEDVKKVTAKRHGTVVKVKRAEKVQKKFLGRPIEVWKLYFNHPQDVPAIRDRIRAHPAVVDIYEYDIPFAKRYLIDKGLIPMEGDEELTMLAFAIATLYHEGEEFGTGPILMISYADGSEARVITWKKIDLPYVDVVSTEKEMIKRFLRVVREKDPDVLITYNGDNFDFAYLKKRCEELGIKFTLGRDGSEPKIQRMGDRFAVEVKGRIHFDLYPVIRRTINLPTYTLEAVYEAVFGKPKEKVYAEEIAQAWESGEGLERVARYSMEDAKVTYELGREFFPMEAQLSRLIGQSLWDVSRSSTGNLVEAFLLRKAYKRNELAPNKPDERELARRRGGYAGGYVKEPERGLWDNIVYLDFRSWYPSIIITHNVSPDTLNREGCKEYDVAPEVGHKFCKDFPGFIPSLLGDLLEEASKIERKMKATVDPLEKKLLVYRQWLIKILANSFYGYQGYAKARWYCKECAESVTAWGREYIEMVIRELEEKFGFKVLYADTDGLHATIPGADAETVKKKAKEFLKYINPKLPGLLELEYEGFYVRGFFVTKKKYAVIDEEGKITTRGLEIVRRDWSEIAKETQARVLEAILKHGDVEEAVRIVKEVTEKLSKYEVPPEKLVIHEQITRDLRDYKATGPHVAVAKRLAARGVKIRPGTVISYIVLKGSGRIGDRAIPADEFDPTKHRYDAEYYIENQVLPAVERILKAFGYRKEDLRYQKTKQVGSGAWLKVKGKKGTEAYVEQKLISEEDLNSAVDHHHHHH

SEQ ID NO: 719 - DNA, 2409 bp, Artificial Sequence
  Description of Artificial Sequence:Thermococcus species 9degreesN-7 mutant DNA polymerase, 9degreesN mutant
atgattctcgataccgactacatcaccgagaacgggaagcccgtgataagggtcttcaagaaggagaacggcgagtttaaaatcgagtacgacagaaccttcgagccctacttctacgcccttctgaaggacgattctgcgatagaggacgtcaagaaggtaaccgcaaagaggcacggaacggttgtcaaggtgaagcgcgccgagaaggtgcagaagaagttcctcggcaggccgatagaggtctggaagctctacttcaaccatcctcaggacgtcccggcgattcgagacaggatacgcgcccaccccgctgtcgttgacatctacgagtacgacatacccttcgccaagcgctacctcatcgacaagggcctgattccgatggagggcgacgaggagcttacgatgctcgccttcgcgatcgcaaccctctatcacgagggcgaggagttcggaaccgggccgattctcatgataagctacgccgacgggagcgaggcgagggtgataacctggaagaagattgaccttccgtacgttgacgtcgtctcgaccgagaaggagatgattaagcgcttcctccgcgtcgtcagggagaaggaccccgacgtgctcatcacctacaacggcgacaacttcgacttcgcctacctgaagaagcgctgtgaggaactcggaataaagttcacactcggcagggacgggagcgagccgaagatacagcgaatgggcgaccgctttgccgttgaggtgaagggcaggattcacttcgacctctaccccgtcataaggcgcacgataaacctcccgacctacacccttgaggccgtttacgaggccgtctttggaaagcccaaggagaaggtttacgcagaggagatagcgcaggcctgggagagcggggagggccttgaaagggttgcaagatactcgatggaggacgctaaggtgacctacgagctgggaagggagttcttcccgatggaggcccagctttcgaggcttataggccagagcctctgggacgtctcgcgctcgagcaccggaaatttggtggaggcattcctcctgcggaaggcctacaagaggaacgagctcgccccaaacaagcccgacgagagggagctcgcgagacggcgcgggggctacgctggcgggtacgttaaggaaccagagcggggattgtgggacaacattgtgtatttagacttccgctcgtggtatccttcaatcatcataacccacaacgtctcgccggataccctcaaccgcgagggctgtaaagagtacgacgtcgcccctgaggttggacacaagttctgcaaggacttccccggcttcataccaagcctcctgggagatttgctcgaggaggcgagcaagatagagcggaagatgaaggcaacggttgacccgctggagaagaaactcctcgtgtacaggcagtggcttataaaaatcctcgccaacagcttctacggctacattggctacgccaaggcccggtggtactgcaaggagtgcgccgagagcgttacggcctggggaagggagtatatagaaatggttatccgggaactcgaagaaaaattcggttttaaagttctctatgccgatacagacggtctccatgctaccattcccggagcagacgctgaaacagtcaagaaaaaagcaaaggagttcttaaaatacattaatccaaaactgcccggcctgctcgaacttgagtacgagggcttctacgtgaggggcttcttcgtcacgaagaagaagtacgctgtgatagacgaggagggcaagataaccacgaggggtcttgagattgtgaggcgcgactggagcgagatagcgaaggagacccaggccagggtcttagaggcgatactcaagcacggtgacgtcgaggaggccgttaggatagtcaaggaagtgacggaaaagctgagcaagtatgaggtcccgcccgagaagctggtaatccacgagcagataacgcgcgatttgagggattacaaagccaccggcccgcacgttgccgttgcgaagaggctcgcggcgcgtggagtgaaaatccggcccggcacggtgataagctacatcgtcctaaagggctctggaaggataggcgacagggcgattccagctgatgagttcgacccgacgaagcaccgctacgatgcggaatactacatcgagaaccaggttctcccggcggtggagaggattctaaaagccttcggctatcggaaggaggatttgcgctaccagaagacgaagcaggtcggctcgggcgcgtggctgaaggtgaaggggaagaagggtaccgaagcttacgtagaacaaaaactcatctcagaagaggatctgaatagcgccgtcgaccatcatcatcatcatcattga

SEQ ID NO: 720 - protein, 802 aa, Artificial Sequence
  Description of Artificial Sequence:Thermococcus species 9degreesN-7 mutant DNA polymerase, 9degreesN mutant
MILDTDYITENGKPVIRVFKKENGEFKIEYDRTFEPYFYALLKDDSAIEDVKKVTAKRHGTVVKVKRAEKVQKKFLGRPIEVWKLYFNHPQDVPAIRDRIRAHPAVVDIYEYDIPFAKRYLIDKGLIPMEGDEELTMLAFAIATLYHEGEEFGTGPILMISYADGSEARVITWKKIDLPYVDVVSTEKEMIKRFLRVVREKDPDVLITYNGDNFDFAYLKKRCEELGIKFTLGRDGSEPKIQRMGDRFAVEVKGRIHFDLYPVIRRTINLPTYTLEAVYEAVFGKPKEKVYAEEIAQAWESGEGLERVARYSMEDAKVTYELGREFFPMEAQLSRLIGQSLWDVSRSSTGNLVEAFLLRKAYKRNELAPNKPDERELARRRGGYAGGYVKEPERGLWDNIVYLDFRSWYPSIIITHNVSPDTLNREGCKEYDVAPEVGHKFCKDFPGFIPSLLGDLLEEASKIERKMKATVDPLEKKLLVYRQWLIKILANSFYGYIGYAKARWYCKECAESVTAWGREYIEMVIRELEEKFGFKVLYADTDGLHATIPGADAETVKKKAKEFLKYINPKLPGLLELEYEGFYVRGFFVTKKKYAVIDEEGKITTRGLEIVRRDWSEIAKETQARVLEAILKHGDVEEAVRIVKEVTEKLSKYEVPPEKLVIHEQITRDLRDYKATGPHVAVAKRLAARGVKIRPGTVISYIVLKGSGRIGDRAIPADEFDPTKHRYDAEYYIENQVLPAVERILKAFGYRKEDLRYQKTKQVGSGAWLKVKGKKGTEAYVEQKLISEEDLNSAVDHHHHHH

SEQ ID NO: 721 - DNA, 2409 bp, Artificial Sequence
  Description of Artificial Sequence:Thermococcus species 9degreesN-7 mutant DNA polymerase, 9degreesN mutant
atgattctcgataccgactacatcaccgagaacgggaagcccgtgataagggtcttcaagaaggagaacggcgagtttaaaatcgagtacgacagaaccttcgagccctacttctacgcccttctgaaggacgattctgcgatagaggacgtcaagaaggtaaccgcaaagaggcacggaacggttgtcaaggtgaagcgcgccgagaaggtgcagaagaagttcctcggcaggccgatagaggtctggaagctctacttcaaccatcctcaggacgtcccggcgattcgagacaggatacgcgcccaccccgctgtcgttgacatctacgagtacgacatacccttcgccaagcgctacctcatcgacaagggcctgattccgatggagggcgacgaggagcttacgatgctcgccttcgcgatcgcaaccctctatcacgagggcgaggagttcggaaccgggccgattctcatgataagctacgccgacgggagcgaggcgagggtgataacctggaagaagattgaccttccgtacgttgacgtcgtctcgaccgagaaggagatgattaagcgcttcctccgcgtcgtcagggagaaggaccccgacgtgctcatcacctacaacggcgacaacttcgacttcgcctacctgaagaagcgctgtgaggaactcggaataaagttcacactcggcagggacgggagcgagccgaagatacagcgaatgggcgaccgctttgccgttgaggtgaagggcaggattcacttcgacctctaccccgtcataaggcgcacgataaacctcccgacctacacccttgaggccgtttacgaggccgtctttggaaagcccaaggagaaggtttacgcagaggagatagcgcaggcctgggagagcggggagggccttgaaagggttgcaagatactcgatggaggacgctaaggtgacctacgagctgggaagggagttcttcccgatggaggcccagctttcgaggcttataggccagagcctctgggacgtctcgcgctcgagcaccggaaatttggtggaggcattcctcctgcggaaggcctacaagaggaacgagctcgccccaaacaagcccgacgagagggagctcgcgagacggcgcgggggctacgctggcgggtacgttaaggaaccagagcggggattgtgggacaacattgtgtatttagacttccgctcgtggtatccttcaatcatcataacccacaacgtctcgccggataccctcaaccgcgagggctgtaaagagtacgacgtcgcccctgaggttggacacaagttctgcaaggacttccccggcttcataccaagcctcctgggagatttgctcgaggaggcgagcaagatagagcggaagatgaaggcaacggttgacccgctggagaagaaactcctcgtgtacaggcagtggcttataaaaatcctcgccaacagcttctacggctaccgtggctacgccaaggcccggtggtactgcaaggagtgcgccgagagcgttacggcctggggaagggagtatatagaaatggttatccgggaactcgaagaaaaattcggttttaaagttctctatgccgatacagacggtctccatgctaccattcccggagcagacgctgaaacagtcaagaaaaaagcaaaggagttcttaaaatacattaatccaaaactgcccggcctgctcgaacttgagtacgagggcttctacgtgaggggcttcttcgtcacgaagaagaagtacgctgtgatagacgaggagggcaagataaccacgaggggtcttgagattgtgaggcgcgactggagcgagatagcgaaggagacccaggccagggtcttagaggcgatactcaagcacggtgacgtcgaggaggccgttaggatagtcaaggaagtgacggaaaagctgagcaagtatgaggtcccgcccgagaagctggtaatccacgagcagataacgcgcgatttgagggattacaaagccaccggcccgcacgttgccgttgcgaagaggctcgcggcgcgtggagtgaaaatccggcccggcacggtgataagctacatcgtcctaaagggctctggaaggataggcgacagggcgattccagctgatgagttcgacccgacgaagcaccgctacgatgcggaatactacatcgagaaccaggttctcccggcggtggagaggattctaaaagccttcggctatcggaaggaggatttgcgctaccagaagacgaagcaggtcggctcgggcgcgtggctgaaggtgaaggggaagaagggtaccgaagcttacgtagaacaaaaactcatctcagaagaggatctgaatagcgccgtcgaccatcatcatcatcatcattga

SEQ ID NO: 722 - protein, 802 aa, Artificial Sequence
  Description of Artificial Sequence:Thermococcus species 9degreesN-7 mutant DNA polymerase, 9degreesN mutant
MILDTDYITENGKPVIRVFKKENGEFKIEYDRTFEPYFYALLKDDSAIEDVKKVTAKRHGTVVKVKRAEKVQKKFLGRPIEVWKLYFNHPQDVPAIRDRIRAHPAVVDIYEYDIPFAKRYLIDKGLIPMEGDEELTMLAFAIATLYHEGEEFGTGPILMISYADGSEARVITWKKIDLPYVDVVSTEKEMIKRFLRVVREKDPDVLITYNGDNFDFAYLKKRCEELGIKFTLGRDGSEPKIQRMGDRFAVEVKGRIHFDLYPVIRRTINLPTYTLEAVYEAVFGKPKEKVYAEEIAQAWESGEGLERVARYSMEDAKVTYELGREFFPMEAQLSRLIGQSLWDVSRSSTGNLVEAFLLRKAYKRNELAPNKPDERELARRRGGYAGGYVKEPERGLWDNIVYLDFRSWYPSIIITHNVSPDTLNREGCKEYDVAPEVGHKFCKDFPGFIPSLLGDLLEEASKIERKMKATVDPLEKKLLVYRQWLIKILANSFYGYRGYAKARWYCKECAESVTAWGREYIEMVIRELEEKFGFKVLYADTDGLHATIPGADAETVKKKAKEFLKYINPKLPGLLELEYEGFYVRGFFVTKKKYAVIDEEGKITTRGLEIVRRDWSEIAKETQARVLEAILKHGDVEEAVRIVKEVTEKLSKYEVPPEKLVIHEQITRDLRDYKATGPHVAVAKRLAARGVKIRPGTVISYIVLKGSGRIGDRAIPADEFDPTKHRYDAEYYIENQVLPAVERILKAFGYRKEDLRYQKTKQVGSGAWLKVKGKKGTEAYVEQKLISEEDLNSAVDHHHHHH

SEQ ID NO: 723 - DNA, 2409 bp, Artificial Sequence
  Description of Artificial Sequence:Thermococcus species 9degreesN-7 mutant DNA polymerase, 9degreesN mutant
atgattctcgataccgactacatcaccgagaacgggaagcccgtgataagggtcttcaagaaggagaacggcgagtttaaaatcgagtacgacagaaccttcgagccctacttctacgcccttctgaaggacgattctgcgatagaggacgtcaagaaggtaaccgcaaagaggcacggaacggttgtcaaggtgaagcgcgccgagaaggtgcagaagaagttcctcggcaggccgatagaggtctggaagctctacttcaaccatcctcaggacgtcccggcgattcgagacaggatacgcgcccaccccgctgtcgttgacatctacgagtacgacatacccttcgccaagcgctacctcatcgacaagggcctgattccgatggagggcgacgaggagcttacgatgctcgccttcgcgatcgcaaccctctatcacgagggcgaggagttcggaaccgggccgattctcatgataagctacgccgacgggagcgaggcgagggtgataacctggaagaagattgaccttccgtacgttgacgtcgtctcgaccgagaaggagatgattaagcgcttcctccgcgtcgtcagggagaaggaccccgacgtgctcatcacctacaacggcgacaacttcgacttcgcctacctgaagaagcgctgtgaggaactcggaataaagttcacactcggcagggacgggagcgagccgaagatacagcgaatgggcgaccgctttgccgttgaggtgaagggcaggattcacttcgacctctaccccgtcataaggcgcacgataaacctcccgacctacacccttgaggccgtttacgaggccgtctttggaaagcccaaggagaaggtttacgcagaggagatagcgcaggcctgggagagcggggagggccttgaaagggttgcaagatactcgatggaggacgctaaggtgacctacgagctgggaagggagttcttcccgatggaggcccagctttcgaggcttataggccagagcctctgggacgtctcgcgctcgagcaccggaaatttggtggaggcattcctcctgcggaaggcctacaagaggaacgagctcgccccaaacaagcccgacgagagggagctcgcgagacggcgcgggggctacgctggcgggtacgttaaggaaccagagcggggattgtgggacaacattgtgtatttagacttccgctcgtggtatccttcaatcatcataacccacaacgtctcgccggataccctcaaccgcgagggctgtaaagagtacgacgtcgcccctgaggttggacacaagttctgcaaggacttccccggcttcataccaagcctcctgggagatttgctcgaggaggcgagcaagatagagcggaagatgaaggcaacggttgacccgctggagaagaaactcctcgtgtacaggcagtggcttataaaaatcctcgccaacagcttctacggctacgctggctacgccaaggcccggtggtactgcaaggagtgcgccgagagcgttacggcctggggaagggagtatatagaaatggttatccgggaactcgaagaaaaattcggttttaaagttctctatgccgatacagacggtctccatgctaccattcccggagcagacgctgaaacagtcaagaaaaaagcaaaggagttcttaaaatacattaatccaaaactgcccggcctgctcgaacttgagtacgagggcttctacgtgaggggcttcttcgtcacgaagaagaagtacgctgtgatagacgaggagggcaagataaccacgaggggtcttgagattgtgaggcgcgactggagcgagatagcgaaggagacccaggccagggtcttagaggcgatactcaagcacggtgacgtcgaggaggccgttaggatagtcaaggaagtgacggaaaagctgagcaagtatgaggtcccgcccgagaagctggtaatccacgagcagataacgcgcgatttgagggattacaaagccaccggcccgcacgttgccgttgcgaagaggctcgcggcgcgtggagtgaaaatccggcccggcacggtgataagctacatcgtcctaaagggctctggaaggataggcgacagggcgattccagctgatgagttcgacccgacgaagcaccgctacgatgcggaatactacatcgagaaccaggttctcccggcggtggagaggattctaaaagccttcggctatcggaaggaggatttgcgctaccagaagacgaagcaggtcggctcgggcgcgtggctgaaggtgaaggggaagaagggtaccgaagcttacgtagaacaaaaactcatctcagaagaggatctgaatagcgccgtcgaccatcatcatcatcatcattga

SEQ ID NO: 724 - protein, 802 aa, Artificial Sequence
  Description of Artificial Sequence:Thermococcus species 9degreesN-7 mutant DNA polymerase, 9degreesN mutant
MILDTDYITENGKPVIRVFKKENGEFKIEYDRTFEPYFYALLKDDSAIEDVKKVTAKRHGTVVKVKRAEKVQKKFLGRPIEVWKLYFNHPQDVPAIRDRIRAHPAVVDIYEYDIPFAKRYLIDKGLIPMEGDEELTMLAFAIATLYHEGEEFGTGPILMISYADGSEARVITWKKIDLPYVDVVSTEKEMIKRFLRVVREKDPDVLITYNGDNFDFAYLKKRCEELGIKFTLGRDGSEPKIQRMGDRFAVEVKGRIHFDLYPVIRRTINLPTYTLEAVYEAVFGKPKEKVYAEEIAQAWESGEGLERVARYSMEDAKVTYELGREFFPMEAQLSRLIGQSLWDVSRSSTGNLVEAFLLRKAYKRNELAPNKPDERELARRRGGYAGGYVKEPERGLWDNIVYLDFRSWYPSIIITHNVSPDTLNREGCKEYDVAPEVGHKFCKDFPGFIPSLLGDLLEEASKIERKMKATVDPLEKKLLVYRQWLIKILANSFYGYAGYAKARWYCKECAESVTAWGREYIEMVIRELEEKFGFKVLYADTDGLHATIPGADAETVKKKAKEFLKYINPKLPGLLELEYEGFYVRGFFVTKKKYAVIDEEGKITTRGLEIVRRDWSEIAKETQARVLEAILKHGDVEEAVRIVKEVTEKLSKYEVPPEKLVIHEQITRDLRDYKATGPHVAVAKRLAARGVKIRPGTVISYIVLKGSGRIGDRAIPADEFDPTKHRYDAEYYIENQVLPAVERILKAFGYRKEDLRYQKTKQVGSGAWLKVKGKKGTEAYVEQKLISEEDLNSAVDHHHHHH

SEQ ID NO: 725 - DNA, 2409 bp, Artificial Sequence
  Description of Artificial Sequence:Thermococcus species 9degreesN-7 mutant DNA polymerase, 9degreesN mutant
atgattctcgataccgactacatcaccgagaacgggaagcccgtgataagggtcttcaagaaggagaacggcgagtttaaaatcgagtacgacagaaccttcgagccctacttctacgcccttctgaaggacgattctgcgatagaggacgtcaagaaggtaaccgcaaagaggcacggaacggttgtcaaggtgaagcgcgccgagaaggtgcagaagaagttcctcggcaggccgatagaggtctggaagctctacttcaaccatcctcaggacgtcccggcgattcgagacaggatacgcgcccaccccgctgtcgttgacatctacgagtacgacatacccttcgccaagcgctacctcatcgacaagggcctgattccgatggagggcgacgaggagcttacgatgctcgccttcgcgatcgcaaccctctatcacgagggcgaggagttcggaaccgggccgattctcatgataagctacgccgacgggagcgaggcgagggtgataacctggaagaagattgaccttccgtacgttgacgtcgtctcgaccgagaaggagatgattaagcgcttcctccgcgtcgtcagggagaaggaccccgacgtgctcatcacctacaacggcgacaacttcgacttcgcctacctgaagaagcgctgtgaggaactcggaataaagttcacactcggcagggacgggagcgagccgaagatacagcgaatgggcgaccgctttgccgttgaggtgaagggcaggattcacttcgacctctaccccgtcataaggcgcacgataaacctcccgacctacacccttgaggccgtttacgaggccgtctttggaaagcccaaggagaaggtttacgcagaggagatagcgcaggcctgggagagcggggagggccttgaaagggttgcaagatactcgatggaggacgctaaggtgacctacgagctgggaagggagttcttcccgatggaggcccagctttcgaggcttataggccagagcctctgggacgtctcgcgctcgagcaccggaaatttggtggaggcattcctcctgcggaaggcctacaagaggaacgagctcgccccaaacaagcccgacgagagggagctcgcgagacggcgcgggggctacgctggcgggtacgttaaggaaccagagcggggattgtgggacaacattgtgtatttagacttccgctcgtggtatccttcaatcatcataacccacaacgtctcgccggataccctcaaccgcgagggctgtaaagagtacgacgtcgcccctgaggttggacacaagttctgcaaggacttccccggcttcataccaagcctcctgggagatttgctcgaggaggcgagcaagatagagcggaagatgaaggcaacggttgacccgctggagaagaaactcctcgtgtacaggcagtggcttataaaaatcctcgccaacagcttctacggctacaacggctacgccaaggcccggtggtactgcaaggagtgcgccgagagcgttacggcctggggaagggagtatatagaaatggttatccgggaactcgaagaaaaattcggttttaaagttctctatgccgatacagacggtctccatgctaccattcccggagcagacgctgaaacagtcaagaaaaaagcaaaggagttcttaaaatacattaatccaaaactgcccggcctgctcgaacttgagtacgagggcttctacgtgaggggcttcttcgtcacgaagaagaagtacgctgtgatagacgaggagggcaagataaccacgaggggtcttgagattgtgaggcgcgactggagcgagatagcgaaggagacccaggccagggtcttagaggcgatactcaagcacggtgacgtcgaggaggccgttaggatagtcaaggaagtgacggaaaagctgagcaagtatgaggtcccgcccgagaagctggtaatccacgagcagataacgcgcgatttgagggattacaaagccaccggcccgcacgttgccgttgcgaagaggctcgcggcgcgtggagtgaaaatccggcccggcacggtgataagctacatcgtcctaaagggctctggaaggataggcgacagggcgattccagctgatgagttcgacccgacgaagcaccgctacgatgcggaatactacatcgagaaccaggttctcccggcggtggagaggattctaaaagccttcggctatcggaaggaggatttgcgctaccagaagacgaagcaggtcggctcgggcgcgtggctgaaggtgaaggggaagaagggtaccgaagcttacgtagaacaaaaactcatctcagaagaggatctgaatagcgccgtcgaccatcatcatcatcatcattga

SEQ ID NO: 726 - protein, 802 aa, Artificial Sequence
  Description of Artificial Sequence:Thermococcus species 9degreesN-7 mutant DNA polymerase, 9degreesN mutant
MILDTDYITENGKPVIRVFKKENGEFKIEYDRTFEPYFYALLKDDSAIEDVKKVTAKRHGTVVKVKRAEKVQKKFLGRPIEVWKLYFNHPQDVPAIRDRIRAHPAVVDIYEYDIPFAKRYLIDKGLIPMEGDEELTMLAFAIATLYHEGEEFGTGPILMISYADGSEARVITWKKIDLPYVDVVSTEKEMIKRFLRVVREKDPDVLITYNGDNFDFAYLKKRCEELGIKFTLGRDGSEPKIQRMGDRFAVEVKGRIHFDLYPVIRRTINLPTYTLEAVYEAVFGKPKEKVYAEEIAQAWESGEGLERVARYSMEDAKVTYELGREFFPMEAQLSRLIGQSLWDVSRSSTGNLVEAFLLRKAYKRNELAPNKPDERELARRRGGYAGGYVKEPERGLWDNIVYLDFRSWYPSIIITHNVSPDTLNREGCKEYDVAPEVGHKFCKDFPGFIPSLLGDLLEEASKIERKMKATVDPLEKKLLVYRQWLIKILANSFYGYNGYAKARWYCKECAESVTAWGREYIEMVIRELEEKFGFKVLYADTDGLHATIPGADAETVKKKAKEFLKYINPKLPGLLELEYEGFYVRGFFVTKKKYAVIDEEGKITTRGLEIVRRDWSEIAKETQARVLEAILKHGDVEEAVRIVKEVTEKLSKYEVPPEKLVIHEQITRDLRDYKATGPHVAVAKRLAARGVKIRPGTVISYIVLKGSGRIGDRAIPADEFDPTKHRYDAEYYIENQVLPAVERILKAFGYRKEDLRYQKTKQVGSGAWLKVKGKKGTEAYVEQKLISEEDLNSAVDHHHHHH

SEQ ID NO: 727 - DNA, 2409 bp, Artificial Sequence
  Description of Artificial Sequence:Thermococcus species 9degreesN-7 mutant DNA polymerase, 9degreesN mutant
atgattctcgataccgactacatcaccgagaacgggaagcccgtgataagggtcttcaagaaggagaacggcgagtttaaaatcgagtacgacagaaccttcgagccctacttctacgcccttctgaaggacgattctgcgatagaggacgtcaagaaggtaaccgcaaagaggcacggaacggttgtcaaggtgaagcgcgccgagaaggtgcagaagaagttcctcggcaggccgatagaggtctggaagctctacttcaaccatcctcaggacgtcccggcgattcgagacaggatacgcgcccaccccgctgtcgttgacatctacgagtacgacatacccttcgccaagcgctacctcatcgacaagggcctgattccgatggagggcgacgaggagcttacgatgctcgccttcgcgatcgcaaccctctatcacgagggcgaggagttcggaaccgggccgattctcatgataagctacgccgacgggagcgaggcgagggtgataacctggaagaagattgaccttccgtacgttgacgtcgtctcgaccgagaaggagatgattaagcgcttcctccgcgtcgtcagggagaaggaccccgacgtgctcatcacctacaacggcgacaacttcgacttcgcctacctgaagaagcgctgtgaggaactcggaataaagttcacactcggcagggacgggagcgagccgaagatacagcgaatgggcgaccgctttgccgttgaggtgaagggcaggattcacttcgacctctaccccgtcataaggcgcacgataaacctcccgacctacacccttgaggccgtttacgaggccgtctttggaaagcccaaggagaaggtttacgcagaggagatagcgcaggcctgggagagcggggagggccttgaaagggttgcaagatactcgatggaggacgctaaggtgacctacgagctgggaagggagttcttcccgatggaggcccagctttcgaggcttataggccagagcctctgggacgtctcgcgctcgagcaccggaaatttggtggaggcattcctcctgcggaaggcctacaagaggaacgagctcgccccaaacaagcccgacgagagggagctcgcgagacggcgcgggggctacgctggcgggtacgttaaggaaccagagcggggattgtgggacaacattgtgtatttagacttccgctcgtggtatccttcaatcatcataacccacaacgtctcgccggataccctcaaccgcgagggctgtaaagagtacgacgtcgcccctgaggttggacacaagttctgcaaggacttccccggcttcataccaagcctcctgggagatttgctcgaggaggcgagcaagatagagcggaagatgaaggcaacggttgacccgctggagaagaaactcctcgtgtacaggcagtggcttataaaaatcctcgccaacagcttctacggctactcgggctacgccaaggcccggtggtactgcaaggagtgcgccgagagcgttacggcctggggaagggagtatatagaaatggttatccgggaactcgaagaaaaattcggttttaaagttctctatgccgatacagacggtctccatgctaccattcccggagcagacgctgaaacagtcaagaaaaaagcaaaggagttcttaaaatacattaatccaaaactgcccggcctgctcgaacttgagtacgagggcttctacgtgaggggcttcttcgtcacgaagaagaagtacgctgtgatagacgaggagggcaagataaccacgaggggtcttgagattgtgaggcgcgactggagcgagatagcgaaggagacccaggccagggtcttagaggcgatactcaagcacggtgacgtcgaggaggccgttaggatagtcaaggaagtgacggaaaagctgagcaagtatgaggtcccgcccgagaagctggtaatccacgagcagataacgcgcgatttgagggattacaaagccaccggcccgcacgttgccgttgcgaagaggctcgcggcgcgtggagtgaaaatccggcccggcacggtgataagctacatcgtcctaaagggctctggaaggataggcgacagggcgattccagctgatgagttcgacccgacgaagcaccgctacgatgcggaatactacatcgagaaccaggttctcccggcggtggagaggattctaaaagccttcggctatcggaaggaggatttgcgctaccagaagacgaagcaggtcggctcgggcgcgtggctgaaggtgaaggggaagaagggtaccgaagcttacgtagaacaaaaactcatctcagaagaggatctgaatagcgccgtcgaccatcatcatcatcatcattga

SEQ ID NO: 728 - protein, 802 aa, Artificial Sequence
  Description of Artificial Sequence:Thermococcus species 9degreesN-7 mutant DNA polymerase, 9degreesN mutant
MILDTDYITENGKPVIRVFKKENGEFKIEYDRTFEPYFYALLKDDSAIEDVKKVTAKRHGTVVKVKRAEKVQKKFLGRPIEVWKLYFNHPQDVPAIRDRIRAHPAVVDIYEYDIPFAKRYLIDKGLIPMEGDEELTMLAFAIATLYHEGEEFGTGPILMISYADGSEARVITWKKIDLPYVDVVSTEKEMIKRFLRVVREKDPDVLITYNGDNFDFAYLKKRCEELGIKFTLGRDGSEPKIQRMGDRFAVEVKGRIHFDLYPVIRRTINLPTYTLEAVYEAVFGKPKEKVYAEEIAQAWESGEGLERVARYSMEDAKVTYELGREFFPMEAQLSRLIGQSLWDVSRSSTGNLVEAFLLRKAYKRNELAPNKPDERELARRRGGYAGGYVKEPERGLWDNIVYLDFRSWYPSIIITHNVSPDTLNREGCKEYDVAPEVGHKFCKDFPGFIPSLLGDLLEEASKIERKMKATVDPLEKKLLVYRQWLIKILANSFYGYSGYAKARWYCKECAESVTAWGREYIEMVIRELEEKFGFKVLYADTDGLHATIPGADAETVKKKAKEFLKYINPKLPGLLELEYEGFYVRGFFVTKKKYAVIDEEGKITTRGLEIVRRDWSEIAKETQARVLEAILKHGDVEEAVRIVKEVTEKLSKYEVPPEKLVIHEQITRDLRDYKATGPHVAVAKRLAARGVKIRPGTVISYIVLKGSGRIGDRAIPADEFDPTKHRYDAEYYIENQVLPAVERILKAFGYRKEDLRYQKTKQVGSGAWLKVKGKKGTEAYVEQKLISEEDLNSAVDHHHHHH

SEQ ID NO: 729 - DNA, 2409 bp, Artificial Sequence
  Description of Artificial Sequence:Thermococcus species 9degreesN-7 mutant DNA polymerase, 9degreesN mutant
atgattctcgataccgactacatcaccgagaacgggaagcccgtgataagggtcttcaagaaggagaacggcgagtttaaaatcgagtacgacagaaccttcgagccctacttctacgcccttctgaaggacgattctgcgatagaggacgtcaagaaggtaaccgcaaagaggcacggaacggttgtcaaggtgaagcgcgccgagaaggtgcagaagaagttcctcggcaggccgatagaggtctggaagctctacttcaaccatcctcaggacgtcccggcgattcgagacaggatacgcgcccaccccgctgtcgttgacatctacgagtacgacatacccttcgccaagcgctacctcatcgacaagggcctgattccgatggagggcgacgaggagcttacgatgctcgccttcgcgatcgcaaccctctatcacgagggcgaggagttcggaaccgggccgattctcatgataagctacgccgacgggagcgaggcgagggtgataacctggaagaagattgaccttccgtacgttgacgtcgtctcgaccgagaaggagatgattaagcgcttcctccgcgtcgtcagggagaaggaccccgacgtgctcatcacctacaacggcgacaacttcgacttcgcctacctgaagaagcgctgtgaggaactcggaataaagttcacactcggcagggacgggagcgagccgaagatacagcgaatgggcgaccgctttgccgttgaggtgaagggcaggattcacttcgacctctaccccgtcataaggcgcacgataaacctcccgacctacacccttgaggccgtttacgaggccgtctttggaaagcccaaggagaaggtttacgcagaggagatagcgcaggcctgggagagcggggagggccttgaaagggttgcaagatactcgatggaggacgctaaggtgacctacgagctgggaagggagttcttcccgatggaggcccagctttcgaggcttataggccagagcctctgggacgtctcgcgctcgagcaccggaaatttggtggaggcattcctcctgcggaaggcctacaagaggaacgagctcgccccaaacaagcccgacgagagggagctcgcgagacggcgcgggggctacgctggcgggtacgttaaggaaccagagcggggattgtgggacaacattgtgtatttagacttccgctcgtggtatccttcaatcatcataacccacaacgtctcgccggataccctcaaccgcgagggctgtaaagagtacgacgtcgcccctgaggttggacacaagttctgcaaggacttccccggcttcataccaagcctcctgggagatttgctcgaggaggcgagcaagatagagcggaagatgaaggcaacggttgacccgctggagaagaaactcctcgtgtacaggcagtggcttataaaaatcctcgccaacagcttctacggctacactggctacgccaaggcccggtggtactgcaaggagtgcgccgagagcgttacggcctggggaagggagtatatagaaatggttatccgggaactcgaagaaaaattcggttttaaagttctctatgccgatacagacggtctccatgctaccattcccggagcagacgctgaaacagtcaagaaaaaagcaaaggagttcttaaaatacattaatccaaaactgcccggcctgctcgaacttgagtacgagggcttctacgtgaggggcttcttcgtcacgaagaagaagtacgctgtgatagacgaggagggcaagataaccacgaggggtcttgagattgtgaggcgcgactggagcgagatagcgaaggagacccaggccagggtcttagaggcgatactcaagcacggtgacgtcgaggaggccgttaggatagtcaaggaagtgacggaaaagctgagcaagtatgaggtcccgcccgagaagctggtaatccacgagcagataacgcgcgatttgagggattacaaagccaccggcccgcacgttgccgttgcgaagaggctcgcggcgcgtggagtgaaaatccggcccggcacggtgataagctacatcgtcctaaagggctctggaaggataggcgacagggcgattccagctgatgagttcgacccgacgaagcaccgctacgatgcggaatactacatcgagaaccaggttctcccggcggtggagaggattctaaaagccttcggctatcggaaggaggatttgcgctaccagaagacgaagcaggtcggctcgggcgcgtggctgaaggtgaaggggaagaagggtaccgaagcttacgtagaacaaaaactcatctcagaagaggatctgaatagcgccgtcgaccatcatcatcatcatcattga

SEQ ID NO: 730 - protein, 802 aa, Artificial Sequence
  Description of Artificial Sequence:Thermococcus species 9degreesN-7 mutant DNA polymerase, 9degreesN mutant
MILDTDYITENGKPVIRVFKKENGEFKIEYDRTFEPYFYALLKDDSAIEDVKKVTAKRHGTVVKVKRAEKVQKKFLGRPIEVWKLYFNHPQDVPAIRDRIRAHPAVVDIYEYDIPFAKRYLIDKGLIPMEGDEELTMLAFAIATLYHEGEEFGTGPILMISYADGSEARVITWKKIDLPYVDVVSTEKEMIKRFLRVVREKDPDVLITYNGDNFDFAYLKKRCEELGIKFTLGRDGSEPKIQRMGDRFAVEVKGRIHFDLYPVIRRTINLPTYTLEAVYEAVFGKPKEKVYAEEIAQAWESGEGLERVARYSMEDAKVTYELGREFFPMEAQLSRLIGQSLWDVSRSSTGNLVEAFLLRKAYKRNELAPNKPDERELARRRGGYAGGYVKEPERGLWDNIVYLDFRSWYPSIIITHNVSPDTLNREGCKEYDVAPEVGHKFCKDFPGFIPSLLGDLLEEASKIERKMKATVDPLEKKLLVYRQWLIKILANSFYGYTGYAKARWYCKECAESVTAWGREYIEMVIRELEEKFGFKVLYADTDGLHATIPGADAETVKKKAKEFLKYINPKLPGLLELEYEGFYVRGFFVTKKKYAVIDEEGKITTRGLEIVRRDWSEIAKETQARVLEAILKHGDVEEAVRIVKEVTEKLSKYEVPPEKLVIHEQITRDLRDYKATGPHVAVAKRLAARGVKIRPGTVISYIVLKGSGRIGDRAIPADEFDPTKHRYDAEYYIENQVLPAVERILKAFGYRKEDLRYQKTKQVGSGAWLKVKGKKGTEAYVEQKLISEEDLNSAVDHHHHHH

SEQ ID NO: 731 - DNA, 2409 bp, Artificial Sequence
  Description of Artificial Sequence:Thermococcus species 9degreesN-7 mutant DNA polymerase, 9degreesN mutant
atgattctcgataccgactacatcaccgagaacgggaagcccgtgataagggtcttcaagaaggagaacggcgagtttaaaatcgagtacgacagaaccttcgagccctacttctacgcccttctgaaggacgattctgcgatagaggacgtcaagaaggtaaccgcaaagaggcacggaacggttgtcaaggtgaagcgcgccgagaaggtgcagaagaagttcctcggcaggccgatagaggtctggaagctctacttcaaccatcctcaggacgtcccggcgattcgagacaggatacgcgcccaccccgctgtcgttgacatctacgagtacgacatacccttcgccaagcgctacctcatcgacaagggcctgattccgatggagggcgacgaggagcttacgatgctcgccttcgcgatcgcaaccctctatcacgagggcgaggagttcggaaccgggccgattctcatgataagctacgccgacgggagcgaggcgagggtgataacctggaagaagattgaccttccgtacgttgacgtcgtctcgaccgagaaggagatgattaagcgcttcctccgcgtcgtcagggagaaggaccccgacgtgctcatcacctacaacggcgacaacttcgacttcgcctacctgaagaagcgctgtgaggaactcggaataaagttcacactcggcagggacgggagcgagccgaagatacagcgaatgggcgaccgctttgccgttgaggtgaagggcaggattcacttcgacctctaccccgtcataaggcgcacgataaacctcccgacctacacccttgaggccgtttacgaggccgtctttggaaagcccaaggagaaggtttacgcagaggagatagcgcaggcctgggagagcggggagggccttgaaagggttgcaagatactcgatggaggacgctaaggtgacctacgagctgggaagggagttcttcccgatggaggcccagctttcgaggcttataggccagagcctctgggacgtctcgcgctcgagcaccggaaatttggtggaggcattcctcctgcggaaggcctacaagaggaacgagctcgccccaaacaagcccgacgagagggagctcgcgagacggcgcgggggctacgctggcgggtacgttaaggaaccagagcggggattgtgggacaacattgtgtatttagacttccgctcgtggtatccttcaatcatcataacccacaacgtctcgccggataccctcaaccgcgagggctgtaaagagtacgacgtcgcccctgaggttggacacaagttctgcaaggacttccccggcttcataccaagcctcctgggagatttgctcgaggaggcgagcaagatagagcggaagatgaaggcaacggttgacccgctggagaagaaactcctcgtgtacaggcagtggcttataaaaatcctcgccaacagcttctacggctaccatggctacgccaaggcccggtggtactgcaaggagtgcgccgagagcgttacggcctggggaagggagtatatagaaatggttatccgggaactcgaagaaaaattcggttttaaagttctctatgccgatacagacggtctccatgctaccattcccggagcagacgctgaaacagtcaagaaaaaagcaaaggagttcttaaaatacattaatccaaaactgcccggcctgctcgaacttgagtacgagggcttctacgtgaggggcttcttcgtcacgaagaagaagtacgctgtgatagacgaggagggcaagataaccacgaggggtcttgagattgtgaggcgcgactggagcgagatagcgaaggagacccaggccagggtcttagaggcgatactcaagcacggtgacgtcgaggaggccgttaggatagtcaaggaagtgacggaaaagctgagcaagtatgaggtcccgcccgagaagctggtaatccacgagcagataacgcgcgatttgagggattacaaagccaccggcccgcacgttgccgttgcgaagaggctcgcggcgcgtggagtgaaaatccggcccggcacggtgataagctacatcgtcctaaagggctctggaaggataggcgacagggcgattccagctgatgagttcgacccgacgaagcaccgctacgatgcggaatactacatcgagaaccaggttctcccggcggtggagaggattctaaaagccttcggctatcggaaggaggatttgcgctaccagaagacgaagcaggtcggctcgggcgcgtggctgaaggtgaaggggaagaagggtaccgaagcttacgtagaacaaaaactcatctcagaagaggatctgaatagcgccgtcgaccatcatcatcatcatcattga

SEQ ID NO: 732 - protein, 802 aa, Artificial Sequence
  Description of Artificial Sequence:Thermococcus species 9degreesN-7 mutant DNA polymerase, 9degreesN mutant
MILDTDYITENGKPVIRVFKKENGEFKIEYDRTFEPYFYALLKDDSAIEDVKKVTAKRHGTVVKVKRAEKVQKKFLGRPIEVWKLYFNHPQDVPAIRDRIRAHPAVVDIYEYDIPFAKRYLIDKGLIPMEGDEELTMLAFAIATLYHEGEEFGTGPILMISYADGSEARVITWKKIDLPYVDVVSTEKEMIKRFLRVVREKDPDVLITYNGDNFDFAYLKKRCEELGIKFTLGRDGSEPKIQRMGDRFAVEVKGRIHFDLYPVIRRTINLPTYTLEAVYEAVFGKPKEKVYAEEIAQAWESGEGLERVARYSMEDAKVTYELGREFFPMEAQLSRLIGQSLWDVSRSSTGNLVEAFLLRKAYKRNELAPNKPDERELARRRGGYAGGYVKEPERGLWDNIVYLDFRSWYPSIIITHNVSPDTLNREGCKEYDVAPEVGHKFCKDFPGFIPSLLGDLLEEASKIERKMKATVDPLEKKLLVYRQWLIKILANSFYGYHGYAKARWYCKECAESVTAWGREYIEMVIRELEEKFGFKVLYADTDGLHATIPGADAETVKKKAKEFLKYINPKLPGLLELEYEGFYVRGFFVTKKKYAVIDEEGKITTRGLEIVRRDWSEIAKETQARVLEAILKHGDVEEAVRIVKEVTEKLSKYEVPPEKLVIHEQITRDLRDYKATGPHVAVAKRLAARGVKIRPGTVISYIVLKGSGRIGDRAIPADEFDPTKHRYDAEYYIENQVLPAVERILKAFGYRKEDLRYQKTKQVGSGAWLKVKGKKGTEAYVEQKLISEEDLNSAVDHHHHHH

SEQ ID NO: 733 - DNA, 2409 bp, Artificial Sequence
  Description of Artificial Sequence:Thermococcus species 9degreesN-7 mutant DNA polymerase, 9degreesN mutant
atgattctcgataccgactacatcaccgagaacgggaagcccgtgataagggtcttcaagaaggagaacggcgagtttaaaatcgagtacgacagaaccttcgagccctacttctacgcccttctgaaggacgattctgcgatagaggacgtcaagaaggtaaccgcaaagaggcacggaacggttgtcaaggtgaagcgcgccgagaaggtgcagaagaagttcctcggcaggccgatagaggtctggaagctctacttcaaccatcctcaggacgtcccggcgattcgagacaggatacgcgcccaccccgctgtcgttgacatctacgagtacgacatacccttcgccaagcgctacctcatcgacaagggcctgattccgatggagggcgacgaggagcttacgatgctcgccttcgcgatcgcaaccctctatcacgagggcgaggagttcggaaccgggccgattctcatgataagctacgccgacgggagcgaggcgagggtgataacctggaagaagattgaccttccgtacgttgacgtcgtctcgaccgagaaggagatgattaagcgcttcctccgcgtcgtcagggagaaggaccccgacgtgctcatcacctacaacggcgacaacttcgacttcgcctacctgaagaagcgctgtgaggaactcggaataaagttcacactcggcagggacgggagcgagccgaagatacagcgaatgggcgaccgctttgccgttgaggtgaagggcaggattcacttcgacctctaccccgtcataaggcgcacgataaacctcccgacctacacccttgaggccgtttacgaggccgtctttggaaagcccaaggagaaggtttacgcagaggagatagcgcaggcctgggagagcggggagggccttgaaagggttgcaagatactcgatggaggacgctaaggtgacctacgagctgggaagggagttcttcccgatggaggcccagctttcgaggcttataggccagagcctctgggacgtctcgcgctcgagcaccggaaatttggtggaggcattcctcctgcggaaggcctacaagaggaacgagctcgccccaaacaagcccgacgagagggagctcgcgagacggcgcgggggctacgctggcgggtacgttaaggaaccagagcggggattgtgggacaacattgtgtatttagacttccgctcgtggtatccttcaatcatcataacccacaacgtctcgccggataccctcaaccgcgagggctgtaaagagtacgacgtcgcccctgaggttggacacaagttctgcaaggacttccccggcttcataccaagcctcctgggagatttgctcgaggaggcgagcaagatagagcggaagatgaaggcaacggttgacccgctggagaagaaactcctcgtgtacaggcagtggcttataaaaatcctcgccaacagcttctacggctacggtggctacgccaaggcccggtggtactgcaaggagtgcgccgagagcgttacggcctggggaagggagtatatagaaatggttatccgggaactcgaagaaaaattcggttttaaagttctctatgccgatacagacggtctccatgctaccattcccggagcagacgctgaaacagtcaagaaaaaagcaaaggagttcttaaaatacattaatccaaaactgcccggcctgctcgaacttgagtacgagggcttctacgtgaggggcttcttcgtcacgaagaagaagtacgctgtgatagacgaggagggcaagataaccacgaggggtcttgagattgtgaggcgcgactggagcgagatagcgaaggagacccaggccagggtcttagaggcgatactcaagcacggtgacgtcgaggaggccgttaggatagtcaaggaagtgacggaaaagctgagcaagtatgaggtcccgcccgagaagctggtaatccacgagcagataacgcgcgatttgagggattacaaagccaccggcccgcacgttgccgttgcgaagaggctcgcggcgcgtggagtgaaaatccggcccggcacggtgataagctacatcgtcctaaagggctctggaaggataggcgacagggcgattccagctgatgagttcgacccgacgaagcaccgctacgatgcggaatactacatcgagaaccaggttctcccggcggtggagaggattctaaaagccttcggctatcggaaggaggatttgcgctaccagaagacgaagcaggtcggctcgggcgcgtggctgaaggtgaaggggaagaagggtaccgaagcttacgtagaacaaaaactcatctcagaagaggatctgaatagcgccgtcgaccatcatcatcatcatcattga

SEQ ID NO: 734 - protein, 802 aa, Artificial Sequence
  Description of Artificial Sequence:Thermococcus species 9degreesN-7 mutant DNA polymerase, 9degreesN mutant
MILDTDYITENGKPVIRVFKKENGEFKIEYDRTFEPYFYALLKDDSAIEDVKKVTAKRHGTVVKVKRAEKVQKKFLGRPIEVWKLYFNHPQDVPAIRDRIRAHPAVVDIYEYDIPFAKRYLIDKGLIPMEGDEELTMLAFAIATLYHEGEEFGTGPILMISYADGSEARVITWKKIDLPYVDVVSTEKEMIKRFLRVVREKDPDVLITYNGDNFDFAYLKKRCEELGIKFTLGRDGSEPKIQRMGDRFAVEVKGRIHFDLYPVIRRTINLPTYTLEAVYEAVFGKPKEKVYAEEIAQAWESGEGLERVARYSMEDAKVTYELGREFFPMEAQLSRLIGQSLWDVSRSSTGNLVEAFLLRKAYKRNELAPNKPDERELARRRGGYAGGYVKEPERGLWDNIVYLDFRSWYPSIIITHNVSPDTLNREGCKEYDVAPEVGHKFCKDFPGFIPSLLGDLLEEASKIERKMKATVDPLEKKLLVYRQWLIKILANSFYGYGGYAKARWYCKECAESVTAWGREYIEMVIRELEEKFGFKVLYADTDGLHATIPGADAETVKKKAKEFLKYINPKLPGLLELEYEGFYVRGFFVTKKKYAVIDEEGKITTRGLEIVRRDWSEIAKETQARVLEAILKHGDVEEAVRIVKEVTEKLSKYEVPPEKLVIHEQITRDLRDYKATGPHVAVAKRLAARGVKIRPGTVISYIVLKGSGRIGDRAIPADEFDPTKHRYDAEYYIENQVLPAVERILKAFGYRKEDLRYQKTKQVGSGAWLKVKGKKGTEAYVEQKLISEEDLNSAVDHHHHHH

SEQ ID NO: 735 - DNA, 2409 bp, Artificial Sequence
  Description of Artificial Sequence:Thermococcus species 9degreesN-7 mutant DNA polymerase, 9degreesN mutant
atgattctcgataccgactacatcaccgagaacgggaagcccgtgataagggtcttcaagaaggagaacggcgagtttaaaatcgagtacgacagaaccttcgagccctacttctacgcccttctgaaggacgattctgcgatagaggacgtcaagaaggtaaccgcaaagaggcacggaacggttgtcaaggtgaagcgcgccgagaaggtgcagaagaagttcctcggcaggccgatagaggtctggaagctctacttcaaccatcctcaggacgtcccggcgattcgagacaggatacgcgcccaccccgctgtcgttgacatctacgagtacgacatacccttcgccaagcgctacctcatcgacaagggcctgattccgatggagggcgacgaggagcttacgatgctcgccttcgcgatcgcaaccctctatcacgagggcgaggagttcggaaccgggccgattctcatgataagctacgccgacgggagcgaggcgagggtgataacctggaagaagattgaccttccgtacgttgacgtcgtctcgaccgagaaggagatgattaagcgcttcctccgcgtcgtcagggagaaggaccccgacgtgctcatcacctacaacggcgacaacttcgacttcgcctacctgaagaagcgctgtgaggaactcggaataaagttcacactcggcagggacgggagcgagccgaagatacagcgaatgggcgaccgctttgccgttgaggtgaagggcaggattcacttcgacctctaccccgtcataaggcgcacgataaacctcccgacctacacccttgaggccgtttacgaggccgtctttggaaagcccaaggagaaggtttacgcagaggagatagcgcaggcctgggagagcggggagggccttgaaagggttgcaagatactcgatggaggacgctaaggtgacctacgagctgggaagggagttcttcccgatggaggcccagctttcgaggcttataggccagagcctctgggacgtctcgcgctcgagcaccggaaatttggtggaggcattcctcctgcggaaggcctacaagaggaacgagctcgccccaaacaagcccgacgagagggagctcgcgagacggcgcgggggctacgctggcgggtacgttaaggaaccagagcggggattgtgggacaacattgtgtatttagacttccgctcgtggtatccttcaatcatcataacccacaacgtctcgccggataccctcaaccgcgagggctgtaaagagtacgacgtcgcccctgaggttggacacaagttctgcaaggacttccccggcttcataccaagcctcctgggagatttgctcgaggaggcgagcaagatagagcggaagatgaaggcaacggttgacccgctggagaagaaactcctcgtgtacaggcagtggcttataaaaatcctcgccaacagcttctacggctactggggctacgccaaggcccggtggtactgcaaggagtgcgccgagagcgttacggcctggggaagggagtatatagaaatggttatccgggaactcgaagaaaaattcggttttaaagttctctatgccgatacagacggtctccatgctaccattcccggagcagacgctgaaacagtcaagaaaaaagcaaaggagttcttaaaatacattaatccaaaactgcccggcctgctcgaacttgagtacgagggcttctacgtgaggggcttcttcgtcacgaagaagaagtacgctgtgatagacgaggagggcaagataaccacgaggggtcttgagattgtgaggcgcgactggagcgagatagcgaaggagacccaggccagggtcttagaggcgatactcaagcacggtgacgtcgaggaggccgttaggatagtcaaggaagtgacggaaaagctgagcaagtatgaggtcccgcccgagaagctggtaatccacgagcagataacgcgcgatttgagggattacaaagccaccggcccgcacgttgccgttgcgaagaggctcgcggcgcgtggagtgaaaatccggcccggcacggtgataagctacatcgtcctaaagggctctggaaggataggcgacagggcgattccagctgatgagttcgacccgacgaagcaccgctacgatgcggaatactacatcgagaaccaggttctcccggcggtggagaggattctaaaagccttcggctatcggaaggaggatttgcgctaccagaagacgaagcaggtcggctcgggcgcgtggctgaaggtgaaggggaagaagggtaccgaagcttacgtagaacaaaaactcatctcagaagaggatctgaatagcgccgtcgaccatcatcatcatcatcattga

SEQ ID NO: 736 - protein, 802 aa, Artificial Sequence
  Description of Artificial Sequence:Thermococcus species 9degreesN-7 mutant DNA polymerase, 9degreesN mutant
MILDTDYITENGKPVIRVFKKENGEFKIEYDRTFEPYFYALLKDDSAIEDVKKVTAKRHGTVVKVKRAEKVQKKFLGRPIEVWKLYFNHPQDVPAIRDRIRAHPAVVDIYEYDIPFAKRYLIDKGLIPMEGDEELTMLAFAIATLYHEGEEFGTGPILMISYADGSEARVITWKKIDLPYVDVVSTEKEMIKRFLRVVREKDPDVLITYNGDNFDFAYLKKRCEELGIKFTLGRDGSEPKIQRMGDRFAVEVKGRIHFDLYPVIRRTINLPTYTLEAVYEAVFGKPKEKVYAEEIAQAWESGEGLERVARYSMEDAKVTYELGREFFPMEAQLSRLIGQSLWDVSRSSTGNLVEAFLLRKAYKRNELAPNKPDERELARRRGGYAGGYVKEPERGLWDNIVYLDFRSWYPSIIITHNVSPDTLNREGCKEYDVAPEVGHKFCKDFPGFIPSLLGDLLEEASKIERKMKATVDPLEKKLLVYRQWLIKILANSFYGYWGYAKARWYCKECAESVTAWGREYIEMVIRELEEKFGFKVLYADTDGLHATIPGADAETVKKKAKEFLKYINPKLPGLLELEYEGFYVRGFFVTKKKYAVIDEEGKITTRGLEIVRRDWSEIAKETQARVLEAILKHGDVEEAVRIVKEVTEKLSKYEVPPEKLVIHEQITRDLRDYKATGPHVAVAKRLAARGVKIRPGTVISYIVLKGSGRIGDRAIPADEFDPTKHRYDAEYYIENQVLPAVERILKAFGYRKEDLRYQKTKQVGSGAWLKVKGKKGTEAYVEQKLISEEDLNSAVDHHHHHH

SEQ ID NO: 737 - DNA, 2409 bp, Artificial Sequence
  Description of Artificial Sequence:Thermococcus species 9degreesN-7 mutant DNA polymerase, 9degreesN mutant
atgattctcgataccgactacatcaccgagaacgggaagcccgtgataagggtcttcaagaaggagaacggcgagtttaaaatcgagtacgacagaaccttcgagccctacttctacgcccttctgaaggacgattctgcgatagaggacgtcaagaaggtaaccgcaaagaggcacggaacggttgtcaaggtgaagcgcgccgagaaggtgcagaagaagttcctcggcaggccgatagaggtctggaagctctacttcaaccatcctcaggacgtcccggcgattcgagacaggatacgcgcccaccccgctgtcgttgacatctacgagtacgacatacccttcgccaagcgctacctcatcgacaagggcctgattccgatggagggcgacgaggagcttacgatgctcgccttcgcgatcgcaaccctctatcacgagggcgaggagttcggaaccgggccgattctcatgataagctacgccgacgggagcgaggcgagggtgataacctggaagaagattgaccttccgtacgttgacgtcgtctcgaccgagaaggagatgattaagcgcttcctccgcgtcgtcagggagaaggaccccgacgtgctcatcacctacaacggcgacaacttcgacttcgcctacctgaagaagcgctgtgaggaactcggaataaagttcacactcggcagggacgggagcgagccgaagatacagcgaatgggcgaccgctttgccgttgaggtgaagggcaggattcacttcgacctctaccccgtcataaggcgcacgataaacctcccgacctacacccttgaggccgtttacgaggccgtctttggaaagcccaaggagaaggtttacgcagaggagatagcgcaggcctgggagagcggggagggccttgaaagggttgcaagatactcgatggaggacgctaaggtgacctacgagctgggaagggagttcttcccgatggaggcccagctttcgaggcttataggccagagcctctgggacgtctcgcgctcgagcaccggaaatttggtggaggcattcctcctgcggaaggcctacaagaggaacgagctcgccccaaacaagcccgacgagagggagctcgcgagacggcgcgggggctacgctggcgggtacgttaaggaaccagagcggggattgtgggacaacattgtgtatttagacttccgctcgtggtatccttcaatcatcataacccacaacgtctcgccggataccctcaaccgcgagggctgtaaagagtacgacgtcgcccctgaggttggacacaagttctgcaaggacttccccggcttcataccaagcctcctgggagatttgctcgaggaggcgagcaagatagagcggaagatgaaggcaacggttgacccgctggagaagaaactcctcgtgtacaggcagtggcttataaaaatcctcgccaacagcttctacggctacttgggctacgccaaggcccggtggtactgcaaggagtgcgccgagagcgttacggcctggggaagggagtatatagaaatggttatccgggaactcgaagaaaaattcggttttaaagttctctatgccgatacagacggtctccatgctaccattcccggagcagacgctgaaacagtcaagaaaaaagcaaaggagttcttaaaatacattaatccaaaactgcccggcctgctcgaacttgagtacgagggcttctacgtgaggggcttcttcgtcacgaagaagaagtacgctgtgatagacgaggagggcaagataaccacgaggggtcttgagattgtgaggcgcgactggagcgagatagcgaaggagacccaggccagggtcttagaggcgatactcaagcacggtgacgtcgaggaggccgttaggatagtcaaggaagtgacggaaaagctgagcaagtatgaggtcccgcccgagaagctggtaatccacgagcagataacgcgcgatttgagggattacaaagccaccggcccgcacgttgccgttgcgaagaggctcgcggcgcgtggagtgaaaatccggcccggcacggtgataagctacatcgtcctaaagggctctggaaggataggcgacagggcgattccagctgatgagttcgacccgacgaagcaccgctacgatgcggaatactacatcgagaaccaggttctcccggcggtggagaggattctaaaagccttcggctatcggaaggaggatttgcgctaccagaagacgaagcaggtcggctcgggcgcgtggctgaaggtgaaggggaagaagggtaccgaagcttacgtagaacaaaaactcatctcagaagaggatctgaatagcgccgtcgaccatcatcatcatcatcattga

SEQ ID NO: 738 - protein, 802 aa, Artificial Sequence
  Description of Artificial Sequence:Thermococcus species 9degreesN-7 mutant DNA polymerase, 9degreesN mutant
MILDTDYITENGKPVIRVFKKENGEFKIEYDRTFEPYFYALLKDDSAIEDVKKVTAKRHGTVVKVKRAEKVQKKFLGRPIEVWKLYFNHPQDVPAIRDRIRAHPAVVDIYEYDIPFAKRYLIDKGLIPMEGDEELTMLAFAIATLYHEGEEFGTGPILMISYADGSEARVITWKKIDLPYVDVVSTEKEMIKRFLRVVREKDPDVLITYNGDNFDFAYLKKRCEELGIKFTLGRDGSEPKIQRMGDRFAVEVKGRIHFDLYPVIRRTINLPTYTLEAVYEAVFGKPKEKVYAEEIAQAWESGEGLERVARYSMEDAKVTYELGREFFPMEAQLSRLIGQSLWDVSRSSTGNLVEAFLLRKAYKRNELAPNKPDERELARRRGGYAGGYVKEPERGLWDNIVYLDFRSWYPSIIITHNVSPDTLNREGCKEYDVAPEVGHKFCKDFPGFIPSLLGDLLEEASKIERKMKATVDPLEKKLLVYRQWLIKILANSFYGYLGYAKARWYCKECAESVTAWGREYIEMVIRELEEKFGFKVLYADTDGLHATIPGADAETVKKKAKEFLKYINPKLPGLLELEYEGFYVRGFFVTKKKYAVIDEEGKITTRGLEIVRRDWSEIAKETQARVLEAILKHGDVEEAVRIVKEVTEKLSKYEVPPEKLVIHEQITRDLRDYKATGPHVAVAKRLAARGVKIRPGTVISYIVLKGSGRIGDRAIPADEFDPTKHRYDAEYYIENQVLPAVERILKAFGYRKEDLRYQKTKQVGSGAWLKVKGKKGTEAYVEQKLISEEDLNSAVDHHHHHH

SEQ ID NO: 739 - DNA, 2409 bp, Artificial Sequence
  Description of Artificial Sequence:Thermococcus species 9degreesN-7 mutant DNA polymerase, 9degreesN mutant
atgattctcgataccgactacatcaccgagaacgggaagcccgtgataagggtcttcaagaaggagaacggcgagtttaaaatcgagtacgacagaaccttcgagccctacttctacgcccttctgaaggacgattctgcgatagaggacgtcaagaaggtaaccgcaaagaggcacggaacggttgtcaaggtgaagcgcgccgagaaggtgcagaagaagttcctcggcaggccgatagaggtctggaagctctacttcaaccatcctcaggacgtcccggcgattcgagacaggatacgcgcccaccccgctgtcgttgacatctacgagtacgacatacccttcgccaagcgctacctcatcgacaagggcctgattccgatggagggcgacgaggagcttacgatgctcgccttcgcgatcgcaaccctctatcacgagggcgaggagttcggaaccgggccgattctcatgataagctacgccgacgggagcgaggcgagggtgataacctggaagaagattgaccttccgtacgttgacgtcgtctcgaccgagaaggagatgattaagcgcttcctccgcgtcgtcagggagaaggaccccgacgtgctcatcacctacaacggcgacaacttcgacttcgcctacctgaagaagcgctgtgaggaactcggaataaagttcacactcggcagggacgggagcgagccgaagatacagcgaatgggcgaccgctttgccgttgaggtgaagggcaggattcacttcgacctctaccccgtcataaggcgcacgataaacctcccgacctacacccttgaggccgtttacgaggccgtctttggaaagcccaaggagaaggtttacgcagaggagatagcgcaggcctgggagagcggggagggccttgaaagggttgcaagatactcgatggaggacgctaaggtgacctacgagctgggaagggagttcttcccgatggaggcccagctttcgaggcttataggccagagcctctgggacgtctcgcgctcgagcaccggaaatttggtggaggcattcctcctgcggaaggcctacaagaggaacgagctcgccccaaacaagcccgacgagagggagctcgcgagacggcgcgggggctacgctggcgggtacgttaaggaaccagagcggggattgtgggacaacattgtgtatttagacttccgctcgtggtatccttcaatcatcataacccacaacgtctcgccggataccctcaaccgcgagggctgtaaagagtacgacgtcgcccctgaggttggacacaagttctgcaaggacttccccggcttcataccaagcctcctgggagatttgctcgaggaggcgagcaagatagagcggaagatgaaggcaacggttgacccgctggagaagaaactcctcgtgtacaggcagtggcttataaaaatcctcgccaacagcttctacggctaccccggctacgccaaggcccggtggtactgcaaggagtgcgccgagagcgttacggcctggggaagggagtatatagaaatggttatccgggaactcgaagaaaaattcggttttaaagttctctatgccgatacagacggtctccatgctaccattcccggagcagacgctgaaacagtcaagaaaaaagcaaaggagttcttaaaatacattaatccaaaactgcccggcctgctcgaacttgagtacgagggcttctacgtgaggggcttcttcgtcacgaagaagaagtacgctgtgatagacgaggagggcaagataaccacgaggggtcttgagattgtgaggcgcgactggagcgagatagcgaaggagacccaggccagggtcttagaggcgatactcaagcacggtgacgtcgaggaggccgttaggatagtcaaggaagtgacggaaaagctgagcaagtatgaggtcccgcccgagaagctggtaatccacgagcagataacgcgcgatttgagggattacaaagccaccggcccgcacgttgccgttgcgaagaggctcgcggcgcgtggagtgaaaatccggcccggcacggtgataagctacatcgtcctaaagggctctggaaggataggcgacagggcgattccagctgatgagttcgacccgacgaagcaccgctacgatgcggaatactacatcgagaaccaggttctcccggcggtggagaggattctaaaagccttcggctatcggaaggaggatttgcgctaccagaagacgaagcaggtcggctcgggcgcgtggctgaaggtgaaggggaagaagggtaccgaagcttacgtagaacaaaaactcatctcagaagaggatctgaatagcgccgtcgaccatcatcatcatcatcattga

SEQ ID NO: 740 - protein, 802 aa, Artificial Sequence
  Description of Artificial Sequence:Thermococcus species 9degreesN-7 mutant DNA polymerase, 9degreesN mutant
MILDTDYITENGKPVIRVFKKENGEFKIEYDRTFEPYFYALLKDDSAIEDVKKVTAKRHGTVVKVKRAEKVQKKFLGRPIEVWKLYFNHPQDVPAIRDRIRAHPAVVDIYEYDIPFAKRYLIDKGLIPMEGDEELTMLAFAIATLYHEGEEFGTGPILMISYADGSEARVITWKKIDLPYVDVVSTEKEMIKRFLRVVREKDPDVLITYNGDNFDFAYLKKRCEELGIKFTLGRDGSEPKIQRMGDRFAVEVKGRIHFDLYPVIRRTINLPTYTLEAVYEAVFGKPKEKVYAEEIAQAWESGEGLERVARYSMEDAKVTYELGREFFPMEAQLSRLIGQSLWDVSRSSTGNLVEAFLLRKAYKRNELAPNKPDERELARRRGGYAGGYVKEPERGLWDNIVYLDFRSWYPSIIITHNVSPDTLNREGCKEYDVAPEVGHKFCKDFPGFIPSLLGDLLEEASKIERKMKATVDPLEKKLLVYRQWLIKILANSFYGYPGYAKARWYCKECAESVTAWGREYIEMVIRELEEKFGFKVLYADTDGLHATIPGADAETVKKKAKEFLKYINPKLPGLLELEYEGFYVRGFFVTKKKYAVIDEEGKITTRGLEIVRRDWSEIAKETQARVLEAILKHGDVEEAVRIVKEVTEKLSKYEVPPEKLVIHEQITRDLRDYKATGPHVAVAKRLAARGVKIRPGTVISYIVLKGSGRIGDRAIPADEFDPTKHRYDAEYYIENQVLPAVERILKAFGYRKEDLRYQKTKQVGSGAWLKVKGKKGTEAYVEQKLISEEDLNSAVDHHHHHH

SEQ ID NO: 741 - DNA, 2409 bp, Artificial Sequence
  Description of Artificial Sequence:Thermococcus species 9degreesN-7 mutant DNA polymerase, 9degreesN mutant
atgattctcgataccgactacatcaccgagaacgggaagcccgtgataagggtcttcaagaaggagaacggcgagtttaaaatcgagtacgacagaaccttcgagccctacttctacgcccttctgaaggacgattctgcgatagaggacgtcaagaaggtaaccgcaaagaggcacggaacggttgtcaaggtgaagcgcgccgagaaggtgcagaagaagttcctcggcaggccgatagaggtctggaagctctacttcaaccatcctcaggacgtcccggcgattcgagacaggatacgcgcccaccccgctgtcgttgacatctacgagtacgacatacccttcgccaagcgctacctcatcgacaagggcctgattccgatggagggcgacgaggagcttacgatgctcgccttcgcgatcgcaaccctctatcacgagggcgaggagttcggaaccgggccgattctcatgataagctacgccgacgggagcgaggcgagggtgataacctggaagaagattgaccttccgtacgttgacgtcgtctcgaccgagaaggagatgattaagcgcttcctccgcgtcgtcagggagaaggaccccgacgtgctcatcacctacaacggcgacaacttcgacttcgcctacctgaagaagcgctgtgaggaactcggaataaagttcacactcggcagggacgggagcgagccgaagatacagcgaatgggcgaccgctttgccgttgaggtgaagggcaggattcacttcgacctctaccccgtcataaggcgcacgataaacctcccgacctacacccttgaggccgtttacgaggccgtctttggaaagcccaaggagaaggtttacgcagaggagatagcgcaggcctgggagagcggggagggccttgaaagggttgcaagatactcgatggaggacgctaaggtgacctacgagctgggaagggagttcttcccgatggaggcccagctttcgaggcttataggccagagcctctgggacgtctcgcgctcgagcaccggaaatttggtggaggcattcctcctgcggaaggcctacaagaggaacgagctcgccccaaacaagcccgacgagagggagctcgcgagacggcgcgggggctacgctggcgggtacgttaaggaaccagagcggggattgtgggacaacattgtgtatttagacttccgctcgtggtatccttcaatcatcataacccacaacgtctcgccggataccctcaaccgcgagggctgtaaagagtacgacgtcgcccctgaggttggacacaagttctgcaaggacttccccggcttcataccaagcctcctgggagatttgctcgaggaggcgagcaagatagagcggaagatgaaggcaacggttgacccgctggagaagaaactcctcgtgtacaggcagtggcttataaaaatcctcgccaacagcttctacggctacaaaggctacgccaaggcccggtggtactgcaaggagtgcgccgagagcgttacggcctggggaagggagtatatagaaatggttatccgggaactcgaagaaaaattcggttttaaagttctctatgccgatacagacggtctccatgctaccattcccggagcagacgctgaaacagtcaagaaaaaagcaaaggagttcttaaaatacattaatccaaaactgcccggcctgctcgaacttgagtacgagggcttctacgtgaggggcttcttcgtcacgaagaagaagtacgctgtgatagacgaggagggcaagataaccacgaggggtcttgagattgtgaggcgcgactggagcgagatagcgaaggagacccaggccagggtcttagaggcgatactcaagcacggtgacgtcgaggaggccgttaggatagtcaaggaagtgacggaaaagctgagcaagtatgaggtcccgcccgagaagctggtaatccacgagcagataacgcgcgatttgagggattacaaagccaccggcccgcacgttgccgttgcgaagaggctcgcggcgcgtggagtgaaaatccggcccggcacggtgataagctacatcgtcctaaagggctctggaaggataggcgacagggcgattccagctgatgagttcgacccgacgaagcaccgctacgatgcggaatactacatcgagaaccaggttctcccggcggtggagaggattctaaaagccttcggctatcggaaggaggatttgcgctaccagaagacgaagcaggtcggctcgggcgcgtggctgaaggtgaaggggaagaagggtaccgaagcttacgtagaacaaaaactcatctcagaagaggatctgaatagcgccgtcgaccatcatcatcatcatcattga

SEQ ID NO: 742 - protein, 802 aa, Artificial Sequence
  Description of Artificial Sequence:Thermococcus species 9degreesN-7 mutant DNA polymerase, 9degreesN mutant
MILDTDYITENGKPVIRVFKKENGEFKIEYDRTFEPYFYALLKDDSAIEDVKKVTAKRHGTVVKVKRAEKVQKKFLGRPIEVWKLYFNHPQDVPAIRDRIRAHPAVVDIYEYDIPFAKRYLIDKGLIPMEGDEELTMLAFAIATLYHEGEEFGTGPILMISYADGSEARVITWKKIDLPYVDVVSTEKEMIKRFLRVVREKDPDVLITYNGDNFDFAYLKKRCEELGIKFTLGRDGSEPKIQRMGDRFAVEVKGRIHFDLYPVIRRTINLPTYTLEAVYEAVFGKPKEKVYAEEIAQAWESGEGLERVARYSMEDAKVTYELGREFFPMEAQLSRLIGQSLWDVSRSSTGNLVEAFLLRKAYKRNELAPNKPDERELARRRGGYAGGYVKEPERGLWDNIVYLDFRSWYPSIIITHNVSPDTLNREGCKEYDVAPEVGHKFCKDFPGFIPSLLGDLLEEASKIERKMKATVDPLEKKLLVYRQWLIKILANSFYGYKGYAKARWYCKECAESVTAWGREYIEMVIRELEEKFGFKVLYADTDGLHATIPGADAETVKKKAKEFLKYINPKLPGLLELEYEGFYVRGFFVTKKKYAVIDEEGKITTRGLEIVRRDWSEIAKETQARVLEAILKHGDVEEAVRIVKEVTEKLSKYEVPPEKLVIHEQITRDLRDYKATGPHVAVAKRLAARGVKIRPGTVISYIVLKGSGRIGDRAIPADEFDPTKHRYDAEYYIENQVLPAVERILKAFGYRKEDLRYQKTKQVGSGAWLKVKGKKGTEAYVEQKLISEEDLNSAVDHHHHHH

SEQ ID NO: 743 - DNA, 2409 bp, Artificial Sequence
  Description of Artificial Sequence:Thermococcus species 9degreesN-7 mutant DNA polymerase, 9degreesN mutant
atgattctcgataccgactacatcaccgagaacgggaagcccgtgataagggtcttcaagaaggagaacggcgagtttaaaatcgagtacgacagaaccttcgagccctacttctacgcccttctgaaggacgattctgcgatagaggacgtcaagaaggtaaccgcaaagaggcacggaacggttgtcaaggtgaagcgcgccgagaaggtgcagaagaagttcctcggcaggccgatagaggtctggaagctctacttcaaccatcctcaggacgtcccggcgattcgagacaggatacgcgcccaccccgctgtcgttgacatctacgagtacgacatacccttcgccaagcgctacctcatcgacaagggcctgattccgatggagggcgacgaggagcttacgatgctcgccttcgcgatcgcaaccctctatcacgagggcgaggagttcggaaccgggccgattctcatgataagctacgccgacgggagcgaggcgagggtgataacctggaagaagattgaccttccgtacgttgacgtcgtctcgaccgagaaggagatgattaagcgcttcctccgcgtcgtcagggagaaggaccccgacgtgctcatcacctacaacggcgacaacttcgacttcgcctacctgaagaagcgctgtgaggaactcggaataaagttcacactcggcagggacgggagcgagccgaagatacagcgaatgggcgaccgctttgccgttgaggtgaagggcaggattcacttcgacctctaccccgtcataaggcgcacgataaacctcccgacctacacccttgaggccgtttacgaggccgtctttggaaagcccaaggagaaggtttacgcagaggagatagcgcaggcctgggagagcggggagggccttgaaagggttgcaagatactcgatggaggacgctaaggtgacctacgagctgggaagggagttcttcccgatggaggcccagctttcgaggcttataggccagagcctctgggacgtctcgcgctcgagcaccggaaatttggtggaggcattcctcctgcggaaggcctacaagaggaacgagctcgccccaaacaagcccgacgagagggagctcgcgagacggcgcgggggctacgctggcgggtacgttaaggaaccagagcggggattgtgggacaacattgtgtatttagacttccgctcgtggtatccttcaatcatcataacccacaacgtctcgccggataccctcaaccgcgagggctgtaaagagtacgacgtcgcccctgaggttggacacaagttctgcaaggacttccccggcttcataccaagcctcctgggagatttgctcgaggaggcgagcaagatagagcggaagatgaaggcaacggttgacccgctggagaagaaactcctcgtgtacaggcagtggcttataaaaatcctcgccaacagcttctacggctacgttggctacgccaaggcccggtggtactgcaaggagtgcgccgagagcgttacggcctggggaagggagtatatagaaatggttatccgggaactcgaagaaaaattcggttttaaagttctctatgccgatacagacggtctccatgctaccattcccggagcagacgctgaaacagtcaagaaaaaagcaaaggagttcttaaaatacattaatccaaaactgcccggcctgctcgaacttgagtacgagggcttctacgtgaggggcttcttcgtcacgaagaagaagtacgctgtgatagacgaggagggcaagataaccacgaggggtcttgagattgtgaggcgcgactggagcgagatagcgaaggagacccaggccagggtcttagaggcgatactcaagcacggtgacgtcgaggaggccgttaggatagtcaaggaagtgacggaaaagctgagcaagtatgaggtcccgcccgagaagctggtaatccacgagcagataacgcgcgatttgagggattacaaagccaccggcccgcacgttgccgttgcgaagaggctcgcggcgcgtggagtgaaaatccggcccggcacggtgataagctacatcgtcctaaagggctctggaaggataggcgacagggcgattccagctgatgagttcgacccgacgaagcaccgctacgatgcggaatactacatcgagaaccaggttctcccggcggtggagaggattctaaaagccttcggctatcggaaggaggatttgcgctaccagaagacgaagcaggtcggctcgggcgcgtggctgaaggtgaaggggaagaagggtaccgaagcttacgtagaacaaaaactcatctcagaagaggatctgaatagcgccgtcgaccatcatcatcatcatcattga

SEQ ID NO: 744 - protein, 802 aa, Artificial Sequence
  Description of Artificial Sequence:Thermococcus species 9degreesN-7 mutant DNA polymerase, 9degreesN mutant
MILDTDYITENGKPVIRVFKKENGEFKIEYDRTFEPYFYALLKDDSAIEDVKKVTAKRHGTVVKVKRAEKVQKKFLGRPIEVWKLYFNHPQDVPAIRDRIRAHPAVVDIYEYDIPFAKRYLIDKGLIPMEGDEELTMLAFAIATLYHEGEEFGTGPILMISYADGSEARVITWKKIDLPYVDVVSTEKEMIKRFLRVVREKDPDVLITYNGDNFDFAYLKKRCEELGIKFTLGRDGSEPKIQRMGDRFAVEVKGRIHFDLYPVIRRTINLPTYTLEAVYEAVFGKPKEKVYAEEIAQAWESGEGLERVARYSMEDAKVTYELGREFFPMEAQLSRLIGQSLWDVSRSSTGNLVEAFLLRKAYKRNELAPNKPDERELARRRGGYAGGYVKEPERGLWDNIVYLDFRSWYPSIIITHNVSPDTLNREGCKEYDVAPEVGHKFCKDFPGFIPSLLGDLLEEASKIERKMKATVDPLEKKLLVYRQWLIKILANSFYGYVGYAKARWYCKECAESVTAWGREYIEMVIRELEEKFGFKVLYADTDGLHATIPGADAETVKKKAKEFLKYINPKLPGLLELEYEGFYVRGFFVTKKKYAVIDEEGKITTRGLEIVRRDWSEIAKETQARVLEAILKHGDVEEAVRIVKEVTEKLSKYEVPPEKLVIHEQITRDLRDYKATGPHVAVAKRLAARGVKIRPGTVISYIVLKGSGRIGDRAIPADEFDPTKHRYDAEYYIENQVLPAVERILKAFGYRKEDLRYQKTKQVGSGAWLKVKGKKGTEAYVEQKLISEEDLNSAVDHHHHHH

SEQ ID NO: 745 - DNA, 2409 bp, Artificial Sequence
  Description of Artificial Sequence:Thermococcus species 9degreesN-7 mutant DNA polymerase, 9degreesN mutant
atgattctcgataccgactacatcaccgagaacgggaagcccgtgataagggtcttcaagaaggagaacggcgagtttaaaatcgagtacgacagaaccttcgagccctacttctacgcccttctgaaggacgattctgcgatagaggacgtcaagaaggtaaccgcaaagaggcacggaacggttgtcaaggtgaagcgcgccgagaaggtgcagaagaagttcctcggcaggccgatagaggtctggaagctctacttcaaccatcctcaggacgtcccggcgattcgagacaggatacgcgcccaccccgctgtcgttgacatctacgagtacgacatacccttcgccaagcgctacctcatcgacaagggcctgattccgatggagggcgacgaggagcttacgatgctcgccttcgcgatcgcaaccctctatcacgagggcgaggagttcggaaccgggccgattctcatgataagctacgccgacgggagcgaggcgagggtgataacctggaagaagattgaccttccgtacgttgacgtcgtctcgaccgagaaggagatgattaagcgcttcctccgcgtcgtcagggagaaggaccccgacgtgctcatcacctacaacggcgacaacttcgacttcgcctacctgaagaagcgctgtgaggaactcggaataaagttcacactcggcagggacgggagcgagccgaagatacagcgaatgggcgaccgctttgccgttgaggtgaagggcaggattcacttcgacctctaccccgtcataaggcgcacgataaacctcccgacctacacccttgaggccgtttacgaggccgtctttggaaagcccaaggagaaggtttacgcagaggagatagcgcaggcctgggagagcggggagggccttgaaagggttgcaagatactcgatggaggacgctaaggtgacctacgagctgggaagggagttcttcccgatggaggcccagctttcgaggcttataggccagagcctctgggacgtctcgcgctcgagcaccggaaatttggtggaggcattcctcctgcggaaggcctacaagaggaacgagctcgccccaaacaagcccgacgagagggagctcgcgagacggcgcgggggctacgctggcgggtacgttaaggaaccagagcggggattgtgggacaacattgtgtatttagacttccgctcgtggtatccttcaatcatcataacccacaacgtctcgccggataccctcaaccgcgagggctgtaaagagtacgacgtcgcccctgaggttggacacaagttctgcaaggacttccccggcttcataccaagcctcctgggagatttgctcgaggaggcgagcaagatagagcggaagatgaaggcaacggttgacccgctggagaagaaactcctcgtgtacaggcagtggcttataaaaatcctcgccaacagcttctacggctacgacggctacgccaaggcccggtggtactgcaaggagtgcgccgagagcgttacggcctggggaagggagtatatagaaatggttatccgggaactcgaagaaaaattcggttttaaagttctctatgccgatacagacggtctccatgctaccattcccggagcagacgctgaaacagtcaagaaaaaagcaaaggagttcttaaaatacattaatccaaaactgcccggcctgctcgaacttgagtacgagggcttctacgtgaggggcttcttcgtcacgaagaagaagtacgctgtgatagacgaggagggcaagataaccacgaggggtcttgagattgtgaggcgcgactggagcgagatagcgaaggagacccaggccagggtcttagaggcgatactcaagcacggtgacgtcgaggaggccgttaggatagtcaaggaagtgacggaaaagctgagcaagtatgaggtcccgcccgagaagctggtaatccacgagcagataacgcgcgatttgagggattacaaagccaccggcccgcacgttgccgttgcgaagaggctcgcggcgcgtggagtgaaaatccggcccggcacggtgataagctacatcgtcctaaagggctctggaaggataggcgacagggcgattccagctgatgagttcgacccgacgaagcaccgctacgatgcggaatactacatcgagaaccaggttctcccggcggtggagaggattctaaaagccttcggctatcggaaggaggatttgcgctaccagaagacgaagcaggtcggctcgggcgcgtggctgaaggtgaaggggaagaagggtaccgaagcttacgtagaacaaaaactcatctcagaagaggatctgaatagcgccgtcgaccatcatcatcatcatcattga

SEQ ID NO: 746 - protein, 802 aa, Artificial Sequence
  Description of Artificial Sequence:Thermococcus species 9degreesN-7 mutant DNA polymerase, 9degreesN mutant
MILDTDYITENGKPVIRVFKKENGEFKIEYDRTFEPYFYALLKDDSAIEDVKKVTAKRHGTVVKVKRAEKVQKKFLGRPIEVWKLYFNHPQDVPAIRDRIRAHPAVVDIYEYDIPFAKRYLIDKGLIPMEGDEELTMLAFAIATLYHEGEEFGTGPILMISYADGSEARVITWKKIDLPYVDVVSTEKEMIKRFLRVVREKDPDVLITYNGDNFDFAYLKKRCEELGIKFTLGRDGSEPKIQRMGDRFAVEVKGRIHFDLYPVIRRTINLPTYTLEAVYEAVFGKPKEKVYAEEIAQAWESGEGLERVARYSMEDAKVTYELGREFFPMEAQLSRLIGQSLWDVSRSSTGNLVEAFLLRKAYKRNELAPNKPDERELARRRGGYAGGYVKEPERGLWDNIVYLDFRSWYPSIIITHNVSPDTLNREGCKEYDVAPEVGHKFCKDFPGFIPSLLGDLLEEASKIERKMKATVDPLEKKLLVYRQWLIKILANSFYGYDGYAKARWYCKECAESVTAWGREYIEMVIRELEEKFGFKVLYADTDGLHATIPGADAETVKKKAKEFLKYINPKLPGLLELEYEGFYVRGFFVTKKKYAVIDEEGKITTRGLEIVRRDWSEIAKETQARVLEAILKHGDVEEAVRIVKEVTEKLSKYEVPPEKLVIHEQITRDLRDYKATGPHVAVAKRLAARGVKIRPGTVISYIVLKGSGRIGDRAIPADEFDPTKHRYDAEYYIENQVLPAVERILKAFGYRKEDLRYQKTKQVGSGAWLKVKGKKGTEAYVEQKLISEEDLNSAVDHHHHHH

SEQ ID NO: 747 - DNA, 2409 bp, Artificial Sequence
  Description of Artificial Sequence:Thermococcus species 9degreesN-7 mutant DNA polymerase, 9degreesN mutant
atgattctcgataccgactacatcaccgagaacgggaagcccgtgataagggtcttcaagaaggagaacggcgagtttaaaatcgagtacgacagaaccttcgagccctacttctacgcccttctgaaggacgattctgcgatagaggacgtcaagaaggtaaccgcaaagaggcacggaacggttgtcaaggtgaagcgcgccgagaaggtgcagaagaagttcctcggcaggccgatagaggtctggaagctctacttcaaccatcctcaggacgtcccggcgattcgagacaggatacgcgcccaccccgctgtcgttgacatctacgagtacgacatacccttcgccaagcgctacctcatcgacaagggcctgattccgatggagggcgacgaggagcttacgatgctcgccttcgcgatcgcaaccctctatcacgagggcgaggagttcggaaccgggccgattctcatgataagctacgccgacgggagcgaggcgagggtgataacctggaagaagattgaccttccgtacgttgacgtcgtctcgaccgagaaggagatgattaagcgcttcctccgcgtcgtcagggagaaggaccccgacgtgctcatcacctacaacggcgacaacttcgacttcgcctacctgaagaagcgctgtgaggaactcggaataaagttcacactcggcagggacgggagcgagccgaagatacagcgaatgggcgaccgctttgccgttgaggtgaagggcaggattcacttcgacctctaccccgtcataaggcgcacgataaacctcccgacctacacccttgaggccgtttacgaggccgtctttggaaagcccaaggagaaggtttacgcagaggagatagcgcaggcctgggagagcggggagggccttgaaagggttgcaagatactcgatggaggacgctaaggtgacctacgagctgggaagggagttcttcccgatggaggcccagctttcgaggcttataggccagagcctctgggacgtctcgcgctcgagcaccggaaatttggtggaggcattcctcctgcggaaggcctacaagaggaacgagctcgccccaaacaagcccgacgagagggagctcgcgagacggcgcgggggctacgctggcgggtacgttaaggaaccagagcggggattgtgggacaacattgtgtatttagacttccgctcgtggtatccttcaatcatcataacccacaacgtctcgccggataccctcaaccgcgagggctgtaaagagtacgacgtcgcccctgaggttggacacaagttctgcaaggacttccccggcttcataccaagcctcctgggagatttgctcgaggaggcgagcaagatagagcggaagatgaaggcaacggttgacccgctggagaagaaactcctcgtgtacaggcagtggcttataaaaatcctcgccaacagcttctacggctactgcggctacgccaaggcccggtggtactgcaaggagtgcgccgagagcgttacggcctggggaagggagtatatagaaatggttatccgggaactcgaagaaaaattcggttttaaagttctctatgccgatacagacggtctccatgctaccattcccggagcagacgctgaaacagtcaagaaaaaagcaaaggagttcttaaaatacattaatccaaaactgcccggcctgctcgaacttgagtacgagggcttctacgtgaggggcttcttcgtcacgaagaagaagtacgctgtgatagacgaggagggcaagataaccacgaggggtcttgagattgtgaggcgcgactggagcgagatagcgaaggagacccaggccagggtcttagaggcgatactcaagcacggtgacgtcgaggaggccgttaggatagtcaaggaagtgacggaaaagctgagcaagtatgaggtcccgcccgagaagctggtaatccacgagcagataacgcgcgatttgagggattacaaagccaccggcccgcacgttgccgttgcgaagaggctcgcggcgcgtggagtgaaaatccggcccggcacggtgataagctacatcgtcctaaagggctctggaaggataggcgacagggcgattccagctgatgagttcgacccgacgaagcaccgctacgatgcggaatactacatcgagaaccaggttctcccggcggtggagaggattctaaaagccttcggctatcggaaggaggatttgcgctaccagaagacgaagcaggtcggctcgggcgcgtggctgaaggtgaaggggaagaagggtaccgaagcttacgtagaacaaaaactcatctcagaagaggatctgaatagcgccgtcgaccatcatcatcatcatcattga

SEQ ID NO: 748 - protein, 802 aa, Artificial Sequence
  Description of Artificial Sequence:Thermococcus species 9degreesN-7 mutant DNA polymerase, 9degreesN mutant
MILDTDYITENGKPVIRVFKKENGEFKIEYDRTFEPYFYALLKDDSAIEDVKKVTAKRHGTVVKVKRAEKVQKKFLGRPIEVWKLYFNHPQDVPAIRDRIRAHPAVVDIYEYDIPFAKRYLIDKGLIPMEGDEELTMLAFAIATLYHEGEEFGTGPILMISYADGSEARVITWKKIDLPYVDVVSTEKEMIKRFLRVVREKDPDVLITYNGDNFDFAYLKKRCEELGIKFTLGRDGSEPKIQRMGDRFAVEVKGRIHFDLYPVIRRTINLPTYTLEAVYEAVFGKPKEKVYAEEIAQAWESGEGLERVARYSMEDAKVTYELGREFFPMEAQLSRLIGQSLWDVSRSSTGNLVEAFLLRKAYKRNELAPNKPDERELARRRGGYAGGYVKEPERGLWDNIVYLDFRSWYPSIIITHNVSPDTLNREGCKEYDVAPEVGHKFCKDFPGFIPSLLGDLLEEASKIERKMKATVDPLEKKLLVYRQWLIKILANSFYGYCGYAKARWYCKECAESVTAWGREYIEMVIRELEEKFGFKVLYADTDGLHATIPGADAETVKKKAKEFLKYINPKLPGLLELEYEGFYVRGFFVTKKKYAVIDEEGKITTRGLEIVRRDWSEIAKETQARVLEAILKHGDVEEAVRIVKEVTEKLSKYEVPPEKLVIHEQITRDLRDYKATGPHVAVAKRLAARGVKIRPGTVISYIVLKGSGRIGDRAIPADEFDPTKHRYDAEYYIENQVLPAVERILKAFGYRKEDLRYQKTKQVGSGAWLKVKGKKGTEAYVEQKLISEEDLNSAVDHHHHHH

SEQ ID NO: 749 - DNA, 2409 bp, Artificial Sequence
  Description of Artificial Sequence:Thermococcus species 9degreesN-7 mutant DNA polymerase, 9degreesN mutant
atgattctcgataccgactacatcaccgagaacgggaagcccgtgataagggtcttcaagaaggagaacggcgagtttaaaatcgagtacgacagaaccttcgagccctacttctacgcccttctgaaggacgattctgcgatagaggacgtcaagaaggtaaccgcaaagaggcacggaacggttgtcaaggtgaagcgcgccgagaaggtgcagaagaagttcctcggcaggccgatagaggtctggaagctctacttcaaccatcctcaggacgtcccggcgattcgagacaggatacgcgcccaccccgctgtcgttgacatctacgagtacgacatacccttcgccaagcgctacctcatcgacaagggcctgattccgatggagggcgacgaggagcttacgatgctcgccttcgcgatcgcaaccctctatcacgagggcgaggagttcggaaccgggccgattctcatgataagctacgccgacgggagcgaggcgagggtgataacctggaagaagattgaccttccgtacgttgacgtcgtctcgaccgagaaggagatgattaagcgcttcctccgcgtcgtcagggagaaggaccccgacgtgctcatcacctacaacggcgacaacttcgacttcgcctacctgaagaagcgctgtgaggaactcggaataaagttcacactcggcagggacgggagcgagccgaagatacagcgaatgggcgaccgctttgccgttgaggtgaagggcaggattcacttcgacctctaccccgtcataaggcgcacgataaacctcccgacctacacccttgaggccgtttacgaggccgtctttggaaagcccaaggagaaggtttacgcagaggagatagcgcaggcctgggagagcggggagggccttgaaagggttgcaagatactcgatggaggacgctaaggtgacctacgagctgggaagggagttcttcccgatggaggcccagctttcgaggcttataggccagagcctctgggacgtctcgcgctcgagcaccggaaatttggtggaggcattcctcctgcggaaggcctacaagaggaacgagctcgccccaaacaagcccgacgagagggagctcgcgagacggcgcgggggctacgctggcgggtacgttaaggaaccagagcggggattgtgggacaacattgtgtatttagacttccgctcgtggtatccttcaatcatcataacccacaacgtctcgccggataccctcaaccgcgagggctgtaaagagtacgacgtcgcccctgaggttggacacaagttctgcaaggacttccccggcttcataccaagcctcctgggagatttgctcgaggaggcgagcaagatagagcggaagatgaaggcaacggttgacccgctggagaagaaactcctcgtgtacaggcagtggcttataaaaatcctcgccaacagcttctacggctacatgggctacgccaaggcccggtggtactgcaaggagtgcgccgagagcgttacggcctggggaagggagtatatagaaatggttatccgggaactcgaagaaaaattcggttttaaagttctctatgccgatacagacggtctccatgctaccattcccggagcagacgctgaaacagtcaagaaaaaagcaaaggagttcttaaaatacattaatccaaaactgcccggcctgctcgaacttgagtacgagggcttctacgtgaggggcttcttcgtcacgaagaagaagtacgctgtgatagacgaggagggcaagataaccacgaggggtcttgagattgtgaggcgcgactggagcgagatagcgaaggagacccaggccagggtcttagaggcgatactcaagcacggtgacgtcgaggaggccgttaggatagtcaaggaagtgacggaaaagctgagcaagtatgaggtcccgcccgagaagctggtaatccacgagcagataacgcgcgatttgagggattacaaagccaccggcccgcacgttgccgttgcgaagaggctcgcggcgcgtggagtgaaaatccggcccggcacggtgataagctacatcgtcctaaagggctctggaaggataggcgacagggcgattccagctgatgagttcgacccgacgaagcaccgctacgatgcggaatactacatcgagaaccaggttctcccggcggtggagaggattctaaaagccttcggctatcggaaggaggatttgcgctaccagaagacgaagcaggtcggctcgggcgcgtggctgaaggtgaaggggaagaagggtaccgaagcttacgtagaacaaaaactcatctcagaagaggatctgaatagcgccgtcgaccatcatcatcatcatcattga

SEQ ID NO: 750 - protein, 802 aa, Artificial Sequence
  Description of Artificial Sequence:Thermococcus species 9degreesN-7 mutant DNA polymerase, 9degreesN mutant
MILDTDYITENGKPVIRVFKKENGEFKIEYDRTFEPYFYALLKDDSAIEDVKKVTAKRHGTVVKVKRAEKVQKKFLGRPIEVWKLYFNHPQDVPAIRDRIRAHPAVVDIYEYDIPFAKRYLIDKGLIPMEGDEELTMLAFAIATLYHEGEEFGTGPILMISYADGSEARVITWKKIDLPYVDVVSTEKEMIKRFLRVVREKDPDVLITYNGDNFDFAYLKKRCEELGIKFTLGRDGSEPKIQRMGDRFAVEVKGRIHFDLYPVIRRTINLPTYTLEAVYEAVFGKPKEKVYAEEIAQAWESGEGLERVARYSMEDAKVTYELGREFFPMEAQLSRLIGQSLWDVSRSSTGNLVEAFLLRKAYKRNELAPNKPDERELARRRGGYAGGYVKEPERGLWDNIVYLDFRSWYPSIIITHNVSPDTLNREGCKEYDVAPEVGHKFCKDFPGFIPSLLGDLLEEASKIERKMKATVDPLEKKLLVYRQWLIKILANSFYGYMGYAKARWYCKECAESVTAWGREYIEMVIRELEEKFGFKVLYADTDGLHATIPGADAETVKKKAKEFLKYINPKLPGLLELEYEGFYVRGFFVTKKKYAVIDEEGKITTRGLEIVRRDWSEIAKETQARVLEAILKHGDVEEAVRIVKEVTEKLSKYEVPPEKLVIHEQITRDLRDYKATGPHVAVAKRLAARGVKIRPGTVISYIVLKGSGRIGDRAIPADEFDPTKHRYDAEYYIENQVLPAVERILKAFGYRKEDLRYQKTKQVGSGAWLKVKGKKGTEAYVEQKLISEEDLNSAVDHHHHHH

SEQ ID NO: 751 - DNA, 1929 bp, Artificial Sequence
  Description of Artificial Sequence:Klenow polymerase parent
atggggggttctcatcatcatcatcatcatggtatggctagcatgactggtggacagcaaatgggtcgggatctgtacgacgatgacgataaggatccgagctcgaccatggtgatttcttatgacaactacgtcaccatccttgatgaagaaacactgaaagcgtggattgcgaacgtggaaaaagcgccggtatttgcatttgctaccgcaaccgacagccttgataacatctctgctaacctggtcgggctttcttttgctatcgagccaggcgtagcggcatatattccggttgctcatgattatcttgatgcgcccgatcaaatctctcgcgagcgtgcactcgagttgctaaaaccgctgctggaagatgaaaaggcgctgaaggtcgggcaaaacctgaaatacgatcgcggtattctggcgaactacggcattgaactgcgtgggattgcgtttgataccatgctggagtcctacattctcaatagcgttgccgggcgtcacgatatggacagcctcgcggaacgttggttgaagcacaaaaccatcacttttgaagagattgctggtaaaggcaaaaatcaactgacctttaaccagattgccctcgaagaagccggacgttacgccgccgaagatgcagatgtcaccttgcagttgcatctgaaaatgtggccggatctgcaaaaacacaaagggccgttgaacgtcttcgagaatatcgaaatgccgctggtgccggtgctttcacgcattgaacgtaacggtgtgaagatcgatccgaaagtgctgcacaatcattctgaagagctcacccttcgtctggctgagctggaaaagaaagcgcatgaaattgcaggtgaggaatttaacctttcttccaccaagcagttacaaaccattctctttgaaaaacagggcattaaaccgctgaagaaaacgccgggtggcgcgccgtcaacgtcggaagaggtactggaagaactggcgctggactatccgttgccaaaagtgattctggagtatcgtggtctggcgaagctgaaatcgacctacaccgacaagctgccgctgatgatcaacccgaaaaccgggcgtgtgcatacctcttatcaccaggcagtaactgcaacgggacgtttatcgtcaaccgatcctaacctgcaaaacattccggtgcgtaacgaagaaggtcgtcgtatccgccaggcgtttattgcgccagaggattatgtgattgtctcagcggactactcgcagattgaactgcgcattatggcgcatctttcgcgtgacaaaggcttgctgaccgcattcgcggaaggaaaagatatccaccgggcaacggcggcagaagtgtttggtttgccactggaaaccgtcaccagcgagcaacgccgtagcgcgaaagcgatcaactttggtctgatttatggcatgagtgctttcggtctggcgcggcaattgaacattccacgtaaagaagcgcagaagtacatggacctttacttcgaacgctaccctggcgtgctggagtatatggaacgcacccgtgctcaggcgaaagagcagggctacgttgaaacgctggacggacgccgtctgtatctgccggatatcaaatccagcaatggtgctcgtcgtgcagcggctgaacgtgcagccattaacgcgccaatgcagggaaccgccgccgacattatcaaacgggcgatgattgccgttgatgcgtggttacaggctgagcaaccgcgtgtacgtatgatcatgcaggtacacgatgaactggtatttgaagttcataaagatgatgttgatgccgtcgcgaagcagattcatcaactgatggaaaactgtacccgtctggatgtgccgttgctggtggaagtggggagtggcgaaaactgggatcaggcgcactaa

SEQ ID NO: 752 - protein, 642 aa, Artificial Sequence
  Description of Artificial Sequence:Klenow polymerase parent
MGGSHHHHHHGMASMTGGQQMGRDLYDDDDKDPSSTMVISYDNYVTILDEETLKAWIANVEKAPVFAFATATDSLDNISANLVGLSFAIEPGVAAYIPVAHDYLDAPDQISRERALELLKPLLEDEKALKVGQNLKYDRGILANYGIELRGIAFDTMLESYILNSVAGRHDMDSLAERWLKHKTITFEEIAGKGKNQLTFNQIALEEAGRYAAEDADVTLQLHLKMWPDLQKHKGPLNVFENIEMPLVPVLSRIERNGVKIDPKVLHNHSEELTLRLAELEKKAHEIAGEEFNLSSTKQLQTILFEKQGIKPLKKTPGGAPSTSEEVLEELALDYPLPKVILEYRGLAKLKSTYTDKLPLMINPKTGRVHTSYHQAVTATGRLSSTDPNLQNIPVRNEEGRRIRQAFIAPEDYVIVSADYSQIELRIMAHLSRDKGLLTAFAEGKDIHRATAAEVFGLPLETVTSEQRRSAKAINFGLIYGMSAFGLARQLNIPRKEAQKYMDLYFERYPGVLEYMERTRAQAKEQGYVETLDGRRLYLPDIKSSNGARRAAAERAAINAPMQGTAADIIKRAMIAVDAWLQAEQPRVRMIMQVHDELVFEVHKDDVDAVAKQIHQLMENCTRLDVPLLVEVGSGENWDQAH

SEQ ID NO: 753 - DNA, 1929 bp, Artificial Sequence
  Description of Artificial Sequence:mutant Klenow DNA polymerase
atggggggttctcatcatcatcatcatcatggtatggctagcatgactggtggacagcaaatgggtcgggatctgtacgacgatgacgataaggatccgagctcgaccatggtgatttcttatgacaactacgtcaccatccttgatgaagaaacactgaaagcgtggattgcgaacgtggaaaaagcgccggtatttgcatttgctaccgcaaccgacagccttgataacatctctgctaacctggtcgggctttcttttgctatcgagccaggcgtagcggcatatattccggttgctcatgattatcttgatgcgcccgatcaaatctctcgcgagcgtgcactcgagttgctaaaaccgctgctggaagatgaaaaggcgctgaaggtcgggcaaaacctgaaatacgatcgcggtattctggcgaactacggcattgaactgcgtgggattgcgtttgataccatgctggagtcctacattctcaatagcgttgccgggcgtcacgatatggacagcctcgcggaacgttggttgaagcacaaaaccatcacttttgaagagattgctggtaaaggcaaaaatcaactgacctttaaccagattgccctcgaagaagccggacgttacgccgccgaagatgcagatgtcaccttgcagttgcatctgaaaatgtggccggatctgcaaaaacacaaagggccgttgaacgtcttcgagaatatcgaaatgccgctggtgccggtgctttcacgcattgaacgtaacggtgtgaagatcgatccgaaagtgctgcacaatcattctgaagagctcacccttcgtctggctgagctggaaaagaaagcgcatgaaattgcaggtgaggaatttaacctttcttccaccaagcagttacaaaccattctctttgaaaaacagggcattaaaccgctgaagaaaacgccgggtggcgcgccgtcaacgtcggaagaggtactggaagaactggcgctggactatccgttgccaaaagtgattctggagtatcgtggtctggcgaagctgaaatcgacctacaccgacaagctgccgctgatgatcaacccgaaaaccgggcgtgtgcatacctcttatcaccaggcagtaactgcaacgggacgtttatcgtcaaccgatcctaacctgcaaaacattccgtgtcgtaacgaagaaggtcgtcgtatccgccaggcgtttattgcgccagaggattatgtgattgtctcagcggactactcgcagattgaactgcgcattatggcgcatctttcgcgtgacaaaggcttgctgaccgcattcgcggaaggaaaagatatccaccgggcaacggcggcagaagtgtttggtttgccactggaaaccgtcaccagcgagcaacgccgtagcgcgaaagcgatcaactttggtctgatttatggcatgagtgctttcggtctggcgcggcaattgaacattccacgtaaagaagcgcagaagtacatggacctttacttcgaacgctaccctggcgtgctggagtatatggaacgcacccgtgctcaggcgaaagagcagggctacgttgaaacgctggacggacgccgtctgtatctgccggatatcaaatccagcaatggtgctcgtcgtgcagcggctgaacgtgcagccattaacgcaccaatgcagggaaccgccgccgacattatcaaacgggcgatgattgccgttgatgcgtggttacaggctgagcaaccgcgtgtacgtatgatcatgcaggtacacgatgaactggtatttgaagttcataaagatgatgttgatgccgtcgcgaagcagattcatcaactgatggaaaactgtacccgtctggatgtgccgttgctggtggaagtggggagtggcgaaaactgggatcaggcgcactaa

SEQ ID NO: 754 - protein, 642 aa, Artificial Sequence
  Description of Artificial Sequence:mutant Klenow DNA polymerase
MGGSHHHHHHGMASMTGGQQMGRDLYDDDDKDPSSTMVISYDNYVTILDEETLKAWIANVEKAPVFAFATATDSLDNISANLVGLSFAIEPGVAAYIPVAHDYLDAPDQISRERALELLKPLLEDEKALKVGQNLKYDRGILANYGIELRGIAFDTMLESYILNSVAGRHDMDSLAERWLKHKTITFEEIAGKGKNQLTFNQIALEEAGRYAAEDADVTLQLHLKMWPDLQKHKGPLNVFENIEMPLVPVLSRIERNGVKIDPKVLHNHSEELTLRLAELEKKAHEIAGEEFNLSSTKQLQTILFEKQGIKPLKKTPGGAPSTSEEVLEELALDYPLPKVILEYRGLAKLKSTYTDKLPLMINPKTGRVHTSYHQAVTATGRLSSTDPNLQNIPCRNEEGRRIRQAFIAPEDYVIVSADYSQIELRIMAHLSRDKGLLTAFAEGKDIHRATAAEVFGLPLETVTSEQRRSAKAINFGLIYGMSAFGLARQLNIPRKEAQKYMDLYFERYPGVLEYMERTRAQAKEQGYVETLDGRRLYLPDIKSSNGARRAAAERAAINAPMQGTAADIIKRAMIAVDAWLQAEQPRVRMIMQVHDELVFEVHKDDVDAVAKQIHQLMENCTRLDVPLLVEVGSGENWDQAH

SEQ ID NO: 755 - DNA, 1929 bp, Artificial Sequence
  Description of Artificial Sequence:mutant Klenow DNA polymerase
atggggggttctcatcatcatcatcatcatggtatggctagcatgactggtggacagcaaatgggtcgggatctgtacgacgatgacgataaggatccgagctcgaccatggtgatttcttatgacaactacgtcaccatccttgatgaagaaacactgaaagcgtggattgcgaacgtggaaaaagcgccggtatttgcatttgctaccgcaaccgacagccttgataacatctctgctaacctggtcgggctttcttttgctatcgagccaggcgtagcggcatatattccggttgctcatgattatcttgatgcgcccgatcaaatctctcgcgagcgtgcactcgagttgctaaaaccgctgctggaagatgaaaaggcgctgaaggtcgggcaaaacctgaaatacgatcgcggtattctggcgaactacggcattgaactgcgtgggattgcgtttgataccatgctggagtcctacattctcaatagcgttgccgggcgtcacgatatggacagcctcgcggaacgttggttgaagcacaaaaccatcacttttgaagagattgctggtaaaggcaaaaatcaactgacctttaaccagattgccctcgaagaagccggacgttacgccgccgaagatgcagatgtcaccttgcagttgcatctgaaaatgtggccggatctgcaaaaacacaaagggccgttgaacgtcttcgagaatatcgaaatgccgctggtgccggtgctttcacgcattgaacgtaacggtgtgaagatcgatccgaaagtgctgcacaatcattctgaagagctcacccttcgtctggctgagctggaaaagaaagcgcatgaaattgcaggtgaggaatttaacctttcttccaccaagcagttacaaaccattctctttgaaaaacagggcattaaaccgctgaagaaaacgccgggtggcgcgccgtcaacgtcggaagaggtactggaagaactggcgctggactatccgttgccaaaagtgattctggagtatcgtggtctggcgaagctgaaatcgacctacaccgacaagctgccgctgatgatcaacccgaaaaccgggcgtgtgcatacctcttatcaccaggcagtaactgcaacgggacgtttatcgtcaaccgatcctaacctgcaaaacattccggtgcgtaacgaagaaggtcgtcgtatccgccaggcgtttattgcgccagaggattatgtgattgtctcagcggactactcgcagaaggaactgcgcattatggcgcatctttcgcgtgacaaaggcttgctgaccgcattcgcggaaggaaaagatatccaccgggcaacggcggcagaagtgtttggtttgccactggaaaccgtcaccagcgagcaacgccgtagcgcgaaagcgatcaactttggtctgatttatggcatgagtgctttcggtctggcgcggcaattgaacattccacgtaaagaagcgcagaagtacatggacctttacttcgaacgctaccctggcgtgctggagtatatggaacgcacccgtgctcaggcgaaagagcagggctacgttgaaacgctggacggacgccgtctgtatctgccggatatcaaatccagcaatggtgctcgtcgtgcagcggctgaacgtgcagccattaacgcaccaatgcagggaaccgccgccgacattatcaaacgggcgatgattgccgttgatgcgtggttacaggctgagcaaccgcgtgtacgtatgatcatgcaggtacacgatgaactggtatttgaagttcataaagatgatgttgatgccgtcgcgaagcagattcatcaactgatggaaaactgtacccgtctggatgtgccgttgctggtggaagtggggagtggcgaaaactgggatcaggcgcactaa

SEQ ID NO: 756 - protein, 642 aa, Artificial Sequence
  Description of Artificial Sequence:mutant Klenow DNA polymerase
MGGSHHHHHHGMASMTGGQQMGRDLYDDDDKDPSSTMVISYDNYVTILDEETLKAWIANVEKAPVFAFATATDSLDNISANLVGLSFAIEPGVAAYIPVAHDYLDAPDQISRERALELLKPLLEDEKALKVGQNLKYDRGILANYGIELRGIAFDTMLESYILNSVAGRHDMDSLAERWLKHKTITFEEIAGKGKNQLTFNQIALEEAGRYAAEDADVTLQLHLKMWPDLQKHKGPLNVFENIEMPLVPVLSRIERNGVKIDPKVLHNHSEELTLRLAELEKKAHEIAGEEFNLSSTKQLQTILFEKQGIKPLKKTPGGAPSTSEEVLEELALDYPLPKVILEYRGLAKLKSTYTDKLPLMINPKTGRVHTSYHQAVTATGRLSSTDPNLQNIPVRNEEGRRIRQAFIAPEDYVIVSADYSQKELRIMAHLSRDKGLLTAFAEGKDIHRATAAEVFGLPLETVTSEQRRSAKAINFGLIYGMSAFGLARQLNIPRKEAQKYMDLYFERYPGVLEYMERTRAQAKEQGYVETLDGRRLYLPDIKSSNGARRAAAERAAINAPMQGTAADIIKRAMIAVDAWLQAEQPRVRMIMQVHDELVFEVHKDDVDAVAKQIHQLMENCTRLDVPLLVEVGSGENWDQAH

SEQ ID NO: 757 - DNA, 1929 bp, Artificial Sequence
  Description of Artificial Sequence:mutant Klenow DNA polymerase
atggggggttctcatcatcatcatcatcatggtatggctagcatgactggtggacagcaaatgggtcgggatctgtacgacgatgacgataaggatccgagctcgaccatggtgatttcttatgacaactacgtcaccatccttgatgaagaaacactgaaagcgtggattgcgaacgtggaaaaagcgccggtatttgcatttgctaccgcaaccgacagccttgataacatctctgctaacctggtcgggctttcttttgctatcgagccaggcgtagcggcatatattccggttgctcatgattatcttgatgcgcccgatcaaatctctcgcgagcgtgcactcgagttgctaaaaccgctgctggaagatgaaaaggcgctgaaggtcgggcaaaacctgaaatacgatcgcggtattctggcgaactacggcattgaactgcgtgggattgcgtttgataccatgctggagtcctacattctcaatagcgttgccgggcgtcacgatatggacagcctcgcggaacgttggttgaagcacaaaaccatcacttttgaagagattgctggtaaaggcaaaaatcaactgacctttaaccagattgccctcgaagaagccggacgttacgccgccgaagatgcagatgtcaccttgcagttgcatctgaaaatgtggccggatctgcaaaaacacaaagggccgttgaacgtcttcgagaatatcgaaatgccgctggtgccggtgctttcacgcattgaacgtaacggtgtgaagatcgatccgaaagtgctgcacaatcattctgaagagctcacccttcgtctggctgagctggaaaagaaagcgcatgaaattgcaggtgaggaatttaacctttcttccaccaagcagttacaaaccattctctttgaaaaacagggcattaaaccgctgaagaaaacgccgggtggcgcgccgtcaacgtcggaagaggtactggaagaactggcgctggactatccgttgccaaaagtgattctggagtatcgtggtctggcgaagctgaaatcgacctacaccgacaagctgccgctgatgatcaacccgaaaaccgggcgtgtgcatacctcttatcaccaggcagtaactgcaacgggacgtttatcgtcaaccgatcctaacctgcaaaacattccggtgcgtaacgaagaaggtcgtcgtatccgccaggcgtttattgcgccagaggattatgtgattgtctcagcggactactcgcaggaagaactgcgcattatggcgcatctttcgcgtgacaaaggcttgctgaccgcattcgcggaaggaaaagatatccaccgggcaacggcggcagaagtgtttggtttgccactggaaaccgtcaccagcgagcaacgccgtagcgcgaaagcgatcaactttggtctgatttatggcatgagtgctttcggtctggcgcggcaattgaacattccacgtaaagaagcgcagaagtacatggacctttacttcgaacgctaccctggcgtgctggagtatatggaacgcacccgtgctcaggcgaaagagcagggctacgttgaaacgctggacggacgccgtctgtatctgccggatatcaaatccagcaatggtgctcgtcgtgcagcggctgaacgtgcagccattaacgcaccaatgcagggaaccgccgccgacattatcaaacgggcgatgattgccgttgatgcgtggttacaggctgagcaaccgcgtgtacgtatgatcatgcaggtacacgatgaactggtatttgaagttcataaagatgatgttgatgccgtcgcgaagcagattcatcaactgatggaaaactgtacccgtctggatgtgccgttgctggtggaagtggggagtggcgaaaactgggatcaggcgcactaa

SEQ ID NO: 758 - protein, 642 aa, Artificial Sequence
  Description of Artificial Sequence:mutant Klenow DNA polymerase
MGGSHHHHHHGMASMTGGQQMGRDLYDDDDKDPSSTMVISYDNYVTILDEETLKAWIANVEKAPVFAFATATDSLDNISANLVGLSFAIEPGVAAYIPVAHDYLDAPDQISRERALELLKPLLEDEKALKVGQNLKYDRGILANYGIELRGIAFDTMLESYILNSVAGRHDMDSLAERWLKHKTITFEEIAGKGKNQLTFNQIALEEAGRYAAEDADVTLQLHLKMWPDLQKHKGPLNVFENIEMPLVPVLSRIERNGVKIDPKVLHNHSEELTLRLAELEKKAHEIAGEEFNLSSTKQLQTILFEKQGIKPLKKTPGGAPSTSEEVLEELALDYPLPKVILEYRGLAKLKSTYTDKLPLMINPKTGRVHTSYHQAVTATGRLSSTDPNLQNIPVRNEEGRRIRQAFIAPEDYVIVSADYSQEELRIMAHLSRDKGLLTAFAEGKDIHRATAAEVFGLPLETVTSEQRRSAKAINFGLIYGMSAFGLARQLNIPRKEAQKYMDLYFERYPGVLEYMERTRAQAKEQGYVETLDGRRLYLPDIKSSNGARRAAAERAAINAPMQGTAADIIKRAMIAVDAWLQAEQPRVRMIMQVHDELVFEVHKDDVDAVAKQIHQLMENCTRLDVPLLVEVGSGENWDQAH

SEQ ID NO: 759 - DNA, 1929 bp, Artificial Sequence
  Description of Artificial Sequence:mutant Klenow DNA polymerase
atggggggttctcatcatcatcatcatcatggtatggctagcatgactggtggacagcaaatgggtcgggatctgtacgacgatgacgataaggatccgagctcgaccatggtgatttcttatgacaactacgtcaccatccttgatgaagaaacactgaaagcgtggattgcgaacgtggaaaaagcgccggtatttgcatttgctaccgcaaccgacagccttgataacatctctgctaacctggtcgggctttcttttgctatcgagccaggcgtagcggcatatattccggttgctcatgattatcttgatgcgcccgatcaaatctctcgcgagcgtgcactcgagttgctaaaaccgctgctggaagatgaaaaggcgctgaaggtcgggcaaaacctgaaatacgatcgcggtattctggcgaactacggcattgaactgcgtgggattgcgtttgataccatgctggagtcctacattctcaatagcgttgccgggcgtcacgatatggacagcctcgcggaacgttggttgaagcacaaaaccatcacttttgaagagattgctggtaaaggcaaaaatcaactgacctttaaccagattgccctcgaagaagccggacgttacgccgccgaagatgcagatgtcaccttgcagttgcatctgaaaatgtggccggatctgcaaaaacacaaagggccgttgaacgtcttcgagaatatcgaaatgccgctggtgccggtgctttcacgcattgaacgtaacggtgtgaagatcgatccgaaagtgctgcacaatcattctgaagagctcacccttcgtctggctgagctggaaaagaaagcgcatgaaattgcaggtgaggaatttaacctttcttccaccaagcagttacaaaccattctctttgaaaaacagggcattaaaccgctgaagaaaacgccgggtggcgcgccgtcaacgtcggaagaggtactggaagaactggcgctggactatccgttgccaaaagtgattctggagtatcgtggtctggcgaagctgaaatcgacctacaccgacaagctgccgctgatgatcaacccgaaaaccgggcgtgtgcatacctcttatcaccaggcagtaactgcaacgggacgtttatcgtcaaccgatcctaacctgcaaaacattccggtgcgtaacgaagaaggtcgtcgtatccgccaggcgtttattgcgccagaggattatgtgattgtctcagcggactactcgcagattgaactgcgcattatggcgcatctttcgcgtgacaaaggcttgctgaccgcattcgcggaaggaaaagatatccaccgggcaacggcggcagaagtgtttggtttgccactggaaaccgtcaccagcgagcaacgcattagcgcgaaagcgatcaactttggtctgatttatggcatgagtgctttcggtctggcgcggcaattgaacattccacgtaaagaagcgcagaagtacatggacctttacttcgaacgctaccctggcgtgctggagtatatggaacgcacccgtgctcaggcgaaagagcagggctacgttgaaacgctggacggacgccgtctgtatctgccggatatcaaatccagcaatggtgctcgtcgtgcagcggctgaacgtgcagccattaacgcaccaatgcagggaaccgccgccgacattatcaaacgggcgatgattgccgttgatgcgtggttacaggctgagcaaccgcgtgtacgtatgatcatgcaggtacacgatgaactggtatttgaagttcataaagatgatgttgatgccgtcgcgaagcagattcatcaactgatggaaaactgtacccgtctggatgtgccgttgctggtggaagtggggagtggcgaaaactgggatcaggcgcactaa

SEQ ID NO: 760 - protein, 642 aa, Artificial Sequence
  Description of Artificial Sequence:mutant Klenow DNA polymerase
MGGSHHHHHHGMASMTGGQQMGRDLYDDDDKDPSSTMVISYDNYVTILDEETLKAWIANVEKAPVFAFATATDSLDNISANLVGLSFAIEPGVAAYIPVAHDYLDAPDQISRERALELLKPLLEDEKALKVGQNLKYDRGILANYGIELRGIAFDTMLESYILNSVAGRHDMDSLAERWLKHKTITFEEIAGKGKNQLTFNQIALEEAGRYAAEDADVTLQLHLKMWPDLQKHKGPLNVFENIEMPLVPVLSRIERNGVKIDPKVLHNHSEELTLRLAELEKKAHEIAGEEFNLSSTKQLQTILFEKQGIKPLKKTPGGAPSTSEEVLEELALDYPLPKVILEYRGLAKLKSTYTDKLPLMINPKTGRVHTSYHQAVTATGRLSSTDPNLQNIPVRNEEGRRIRQAFIAPEDYVIVSADYSQIELRIMAHLSRDKGLLTAFAEGKDIHRATAAEVFGLPLETVTSEQRISAKAINFGLIYGMSAFGLARQLNIPRKEAQKYMDLYFERYPGVLEYMERTRAQAKEQGYVETLDGRRLYLPDIKSSNGARRAAAERAAINAPMQGTAADIIKRAMIAVDAWLQAEQPRVRMIMQVHDELVFEVHKDDVDAVAKQIHQLMENCTRLDVPLLVEVGSGENWDQAH

SEQ ID NO: 761 - DNA, 1929 bp, Artificial Sequence
  Description of Artificial Sequence:mutant Klenow DNA polymerase
atggggggttctcatcatcatcatcatcatggtatggctagcatgactggtggacagcaaatgggtcgggatctgtacgacgatgacgataaggatccgagctcgaccatggtgatttcttatgacaactacgtcaccatccttgatgaagaaacactgaaagcgtggattgcgaacgtggaaaaagcgccggtatttgcatttgctaccgcaaccgacagccttgataacatctctgctaacctggtcgggctttcttttgctatcgagccaggcgtagcggcatatattccggttgctcatgattatcttgatgcgcccgatcaaatctctcgcgagcgtgcactcgagttgctaaaaccgctgctggaagatgaaaaggcgctgaaggtcgggcaaaacctgaaatacgatcgcggtattctggcgaactacggcattgaactgcgtgggattgcgtttgataccatgctggagtcctacattctcaatagcgttgccgggcgtcacgatatggacagcctcgcggaacgttggttgaagcacaaaaccatcacttttgaagagattgctggtaaaggcaaaaatcaactgacctttaaccagattgccctcgaagaagccggacgttacgccgccgaagatgcagatgtcaccttgcagttgcatctgaaaatgtggccggatctgcaaaaacacaaagggccgttgaacgtcttcgagaatatcgaaatgccgctggtgccggtgctttcacgcattgaacgtaacggtgtgaagatcgatccgaaagtgctgcacaatcattctgaagagctcacccttcgtctggctgagctggaaaagaaagcgcatgaaattgcaggtgaggaatttaacctttcttccaccaagcagttacaaaccattctctttgaaaaacagggcattaaaccgctgaagaaaacgccgggtggcgcgccgtcaacgtcggaagaggtactggaagaactggcgctggactatccgttgccaaaagtgattctggagtatcgtggtctggcgaagctgaaatcgacctacaccgacaagctgccgctgatgatcaacccgaaaaccgggcgtgtgcatacctcttatcaccaggcagtaactgcaacgggacgtttatcgtcaaccgatcctaacctgcaaaacattccggtgcgtaacgaagaaggtcgtcgtatccgccaggcgtttattgcgccagaggattatgtgattgtctcagcggactactcgcagattgaactgcgcattatggcgcatctttcgcgtgacaaaggcttgctgaccgcattcgcggaaggaaaagatatccaccgggcaacggcggcagaagtgtttggtttgccactggaaaccgtcaccagcgagcaacgccgtagctcgaaagcgatcaactttggtctgatttatggcatgagtgctttcggtctggcgcggcaattgaacattccacgtaaagaagcgcagaagtacatggacctttacttcgaacgctaccctggcgtgctggagtatatggaacgcacccgtgctcaggcgaaagagcagggctacgttgaaacgctggacggacgccgtctgtatctgccggatatcaaatccagcaatggtgctcgtcgtgcagcggctgaacgtgcagccattaacgcaccaatgcagggaaccgccgccgacattatcaaacgggcgatgattgccgttgatgcgtggttacaggctgagcaaccgcgtgtacgtatgatcatgcaggtacacgatgaactggtatttgaagttcataaagatgatgttgatgccgtcgcgaagcagattcatcaactgatggaaaactgtacccgtctggatgtgccgttgctggtggaagtggggagtggcgaaaactgggatcaggcgcactaa

SEQ ID NO: 762 - protein, 642 aa, Artificial Sequence
  Description of Artificial Sequence:mutant Klenow DNA polymerase
MGGSHHHHHHGMASMTGGQQMGRDLYDDDDKDPSSTMVISYDNYVTILDEETLKAWIANVEKAPVFAFATATDSLDNISANLVGLSFAIEPGVAAYIPVAHDYLDAPDQISRERALELLKPLLEDEKALKVGQNLKYDRGILANYGIELRGIAFDTMLESYILNSVAGRHDMDSLAERWLKHKTITFEEIAGKGKNQLTFNQIALEEAGRYAAEDADVTLQLHLKMWPDLQKHKGPLNVFENIEMPLVPVLSRIERNGVKIDPKVLHNHSEELTLRLAELEKKAHEIAGEEFNLSSTKQLQTILFEKQGIKPLKKTPGGAPSTSEEVLEELALDYPLPKVILEYRGLAKLKSTYTDKLPLMINPKTGRVHTSYHQAVTATGRLSSTDPNLQNIPVRNEEGRRIRQAFIAPEDYVIVSADYSQIELRIMAHLSRDKGLLTAFAEGKDIHRATAAEVFGLPLETVTSEQRRSSKAINFGLIYGMSAFGLARQLNIPRKEAQKYMDLYFERYPGVLEYMERTRAQAKEQGYVETLDGRRLYLPDIKSSNGARRAAAERAAINAPMQGTAADIIKRAMIAVDAWLQAEQPRVRMIMQVHDELVFEVHKDDVDAVAKQIHQLMENCTRLDVPLLVEVGSGENWDQAH

SEQ ID NO: 763 - DNA, 1929 bp, Artificial Sequence
  Description of Artificial Sequence:mutant Klenow DNA polymerase
atggggggttctcatcatcatcatcatcatggtatggctagcatgactggtggacagcaaatgggtcgggatctgtacgacgatgacgataaggatccgagctcgaccatggtgatttcttatgacaactacgtcaccatccttgatgaagaaacactgaaagcgtggattgcgaacgtggaaaaagcgccggtatttgcatttgctaccgcaaccgacagccttgataacatctctgctaacctggtcgggctttcttttgctatcgagccaggcgtagcggcatatattccggttgctcatgattatcttgatgcgcccgatcaaatctctcgcgagcgtgcactcgagttgctaaaaccgctgctggaagatgaaaaggcgctgaaggtcgggcaaaacctgaaatacgatcgcggtattctggcgaactacggcattgaactgcgtgggattgcgtttgataccatgctggagtcctacattctcaatagcgttgccgggcgtcacgatatggacagcctcgcggaacgttggttgaagcacaaaaccatcacttttgaagagattgctggtaaaggcaaaaatcaactgacctttaaccagattgccctcgaagaagccggacgttacgccgccgaagatgcagatgtcaccttgcagttgcatctgaaaatgtggccggatctgcaaaaacacaaagggccgttgaacgtcttcgagaatatcgaaatgccgctggtgccggtgctttcacgcattgaacgtaacggtgtgaagatcgatccgaaagtgctgcacaatcattctgaagagctcacccttcgtctggctgagctggaaaagaaagcgcatgaaattgcaggtgaggaatttaacctttcttccaccaagcagttacaaaccattctctttgaaaaacagggcattaaaccgctgaagaaaacgccgggtggcgcgccgtcaacgtcggaagaggtactggaagaactggcgctggactatccgttgccaaaagtgattctggagtatcgtggtctggcgaagctgaaatcgacctacaccgacaagctgccgctgatgatcaacccgaaaaccgggcgtgtgcatacctcttatcaccaggcagtaactgcaacgggacgtttatcgtcaaccgatcctaacctgcaaaacattccggtgcgtaacgaagaaggtcgtcgtatccgccaggcgtttattgcgccagaggattatgtgattgtctcagcggactactcgcagattgaactgcgcattatggcgcatctttcgcgtgacaaaggcttgctgaccgcattcgcggaaggaaaagatatccaccgggcaacggcggcagaagtgtttggtttgccactggaaaccgtcaccagcgagcaacgccgtagcgcgaaagcgatcaactttggtctgatttatggcatgagtgctttcggtctggcgcggcaattgaacattccacgtaaagaagcgcagaagtacatggacgggtacttcgaacgctaccctggcgtgctggagtatatggaacgcacccgtgctcaggcgaaagagcagggctacgttgaaacgctggacggacgccgtctgtatctgccggatatcaaatccagcaatggtgctcgtcgtgcagcggctgaacgtgcagccattaacgcaccaatgcagggaaccgccgccgacattatcaaacgggcgatgattgccgttgatgcgtggttacaggctgagcaaccgcgtgtacgtatgatcatgcaggtacacgatgaactggtatttgaagttcataaagatgatgttgatgccgtcgcgaagcagattcatcaactgatggaaaactgtacccgtctggatgtgccgttgctggtggaagtggggagtggcgaaaactgggatcaggcgcactaa

SEQ ID NO: 764 - protein, 642 aa, Artificial Sequence
  Description of Artificial Sequence:mutant Klenow DNA polymerase
MGGSHHHHHHGMASMTGGQQMGRDLYDDDDKDPSSTMVISYDNYVTILDEETLKAWIANVEKAPVFAFATATDSLDNISANLVGLSFAIEPGVAAYIPVAHDYLDAPDQISRERALELLKPLLEDEKALKVGQNLKYDRGILANYGIELRGIAFDTMLESYILNSVAGRHDMDSLAERWLKHKTITFEEIAGKGKNQLTFNQIALEEAGRYAAEDADVTLQLHLKMWPDLQKHKGPLNVFENIEMPLVPVLSRIERNGVKIDPKVLHNHSEELTLRLAELEKKAHEIAGEEFNLSSTKQLQTILFEKQGIKPLKKTPGGAPSTSEEVLEELALDYPLPKVILEYRGLAKLKSTYTDKLPLMINPKTGRVHTSYHQAVTATGRLSSTDPNLQNIPVRNEEGRRIRQAFIAPEDYVIVSADYSQIELRIMAHLSRDKGLLTAFAEGKDIHRATAAEVFGLPLETVTSEQRRSAKAINFGLIYGMSAFGLARQLNIPRKEAQKYMDGYFERYPGVLEYMERTRAQAKEQGYVETLDGRRLYLPDIKSSNGARRAAAERAAINAPMQGTAADIIKRAMIAVDAWLQAEQPRVRMIMQVHDELVFEVHKDDVDAVAKQIHQLMENCTRLDVPLLVEVGSGENWDQAH

SEQ ID NO: 765 - DNA, 2592 bp, Artificial Sequence
  Description of Artificial Sequence:Taq polymerase parent
atggggggttctcatcatcatcatcatcatggtatggctagaatgactggtggacagcaaatgggtcgggatctgtacgacgatgacgataagatgagagggatgctgcccctctttgagcccaagggccgggtcctcctggtggacggccaccacctggcctaccgcaccttccacgccctgaagggcctcaccaccagccggggggagccggtgcaggcggtctacggcttcgccaagagcctcctcaaggccctcaaggaggacggggacgcggtgatcgtggtctttgacgccaaggccccctccttccgccacgaggcctacggggggtacaaggcgggccgggcccccacgccggaggactttccccggcaactcgccctcatcaaggagctggtggacctcctggggctggcgcgcctcgaggtcccgggctacgaggcggacgacgtcctggccagcctggccaagaaggcggaaaaggagggctacgaggtccgcatcctcaccgccgacaaagacctttaccagctcctttccgaccgcatccacgtcctccaccccgaggggtacctcatcaccccggcctggctttgggaaaagtacggcctgaggcccgaccagtgggccgactaccgggccctgaccggggacgagtccgacaaccttcccggggtcaagggcatcggggagaagacggcgaggaagcttctggaggagtgggggagcctggaagccctcctcaagaacctggaccggctgaagcccgccatccgggagaagatcctggcccacatggacgatctgaagctctcctgggacctggccaaggtgcgcaccgacctgcccctggaggtggacttcgccaaaaggcgggagcccgaccgggagaggcttagggcctttctggagaggcttgagtttggcagcctcctccacgagttcggccttctggaaagccccaaggccctggaggaggccccctggcccccgccggaaggggccttcgtgggctttgtgctttcccgcaaggagcccatgtgggccgatcttctggccctggccgccgccagggggggccgggtccaccgggcccccgagccttataaagccctcagggacctgaaggaggcgcgggggcttctcgccaaagacctgagcgttctggccctgagggaaggccttggcctcccgcccggcgacgaccccatgctcctcgcctacctcctggacccttccaacaccacccccgagggggtggcccggcgctacggcggggagtggacggaggaggcgggggagcgggccgccctttccgagaggctcttcgccaacctgtgggggaggcttgagggggaggagaggctcctttggctttaccgggaggtggagaggcccctttccgctgtcctggcccacatggaggccacgggggtgcgcctggacgtggcctatctcagggccttgtccctggaggtggccgaggagatcgcccgcctcgaggccgaggtcttccgcctggccggccaccccttcaacctcaactcccgggaccagctggaaagggtcctctttgacgagctagggcttcccgccatcggcaagacggagaagaccggcaagcgctccaccagcgccgccgtcctggaggccctccgcgaggcccaccccatcgtggagaagatcctgcagtaccgggagctcaccaagctgaagagcacctacattgaccccttgccggacctcatccaccccaggacgggccgcctccacacccgcttcaaccagacggccacggccacgggcaggctaagtagctccgatcccaacctccagaacatccccgtacgcaccccgcttgggcagaggatccgccgggccttcatcgccgaggaggggtggctattggtggccctggactatagccagatagagctcagggtgctggcccacctctccggcgacgagaacctgatccgggtcttccaggaggggcgggacatccacacggagaccgccagctggatgttcggggtcccgcgggaggccgtggaccccctgatgcgccgggcggccaagaccatcaacttcggggtcctctacggcatgtcggcccaccgcctctcccaggagctagccatcccttacgaggaggcccaggccttcattgagcgctactttcagagcttccccaaggtgcgggcctggattgagaagaccctggaggagggcaggaggcgggggtacgtggagaccctcttcggccgccgccgctacgtgccagacctagaggcccgggtgaagagcgtgcgggaggcggccgagcgcatggccttcaacatgcccgtccagggcaccgccgccgacctcatgaagctggctatggtgaagctcttccccaggctggaggaaatgggggccaggatgctccttcaggtccacgacgagctggtcctcgaggccccaaaagagagggcggaggccgtggcccggctggccaaggaggtcatggagggggtgtatcccctggccgtgcccctggaggtggaggtggggataggggaggactggctctccgccaaggagtga

SEQ ID NO: 766 - protein, 863 aa, Artificial Sequence
  Description of Artificial Sequence:Taq polymerase parent
MGGSHHHHHHGMARMTGGQQMGRDLYDDDDKMRGMLPLFEPKGRVLLVDGHHLAYRTFHALKGLTTSRGEPVQAVYGFAKSLLKALKEDGDAVIVVFDAKAPSFRHEAYGGYKAGRAPTPEDFPRQLALIKELVDLLGLARLEVPGYEADDVLASLAKKAEKEGYEVRILTADKDLYQLLSDRIHVLHPEGYLITPAWLWEKYGLRPDQWADYRALTGDESDNLPGVKGIGEKTARKLLEEWGSLEALLKNLDRLKPAIREKILAHMDDLKLSWDLAKVRTDLPLEVDFAKRREPDRERLRAFLERLEFGSLLHEFGLLESPKALEEAPWPPPEGAFVGFVLSRKEPMWADLLALAAARGGRVHRAPEPYKALRDLKEARGLLAKDLSVLALREGLGLPPGDDPMLLAYLLDPSNTTPEGVARRYGGEWTEEAGERAALSERLFANLWGRLEGEERLLWLYREVERPLSAVLAHMEATGVRLDVAYLRALSLEVAEEIARLEAEVFRLAGHPFNLNSRDQLERVLFDELGLPAIGKTEKTGKRSTSAAVLEALREAHPIVEKILQYRELTKLKSTYIDPLPDLIHPRTGRLHTRFNQTATATGRLSSSDPNLQNIPVRTPLGQRIRRAFIAEEGWLLVALDYSQIELRVLAHLSGDENLIRVFQEGRDIHTETASWMFGVPREAVDPLMRRAAKTINFGVLYGMSAHRLSQELAIPYEEAQAFIERYFQSFPKVRAWIEKTLEEGRRRGYVETLFGRRRYVPDLEARVKSVREAAERMAFNMPVQGTAADLMKLAMVKLFPRLEEMGARMLLQVHDELVLEAPKERAEAVARLAKEVMEGVYPLAVPLEVEVGIGEDWLSAKE

SEQ ID NO: 767 - DNA, 2592 bp, Artificial Sequence
  Description of Artificial Sequence:mutant Taq polymerase
atggggggttctcatcatcatcatcatcatggtatggctagaatgactggtggacagcaaatgggtcgggatctgtacgacgatgacgataagatgagagggatgctgcccctctttgagcccaagggccgggtcctcctggtggacggccaccacctggcctaccgcaccttccacgccctgaagggcctcaccaccagccggggggagccggtgcaggcggtctacggcttcgccaagagcctcctcaaggccctcaaggaggacggggacgcggtgatcgtggtctttgacgccaaggccccctccttccgccacgaggcctacggggggtacaaggcgggccgggcccccacgccggaggactttccccggcaactcgccctcatcaaggagctggtggacctcctggggctggcgcgcctcgaggtcccgggctacgaggcggacgacgtcctggccagcctggccaagaaggcggaaaaggagggctacgaggtccgcatcctcaccgccgacaaagacctttaccagctcctttccgaccgcatccacgtcctccaccccgaggggtacctcatcaccccggcctggctttgggaaaagtacggcctgaggcccgaccagtgggccgactaccgggccctgaccggggacgagtccgacaaccttcccggggtcaagggcatcggggagaagacggcgaggaagcttctggaggagtgggggagcctggaagccctcctcaagaacctggaccggctgaagcccgccatccgggagaagatcctggcccacatggacgatctgaagctctcctgggacctggccaaggtgcgcaccgacctgcccctggaggtggacttcgccaaaaggcgggagcccgaccgggagaggcttagggcctttctggagaggcttgagtttggcagcctcctccacgagttcggccttctggaaagccccaaggccctggaggaggccccctggcccccgccggaaggggccttcgtgggctttgtgctttcccgcaaggagcccatgtgggccgatcttctggccctggccgccgccagggggggccgggtccaccgggcccccgagccttataaagccctcagggacctgaaggaggcgcgggggcttctcgccaaagacctgagcgttctggccctgagggaaggccttggcctcccgcccggcgacgaccccatgctcctcgcctacctcctggacccttccaacaccacccccgagggggtggcccggcgctacggcggggagtggacggaggaggcgggggagcgggccgccctttccgagaggctcttcgccaacctgtgggggaggcttgagggggaggagaggctcctttggctttaccgggaggtggagaggcccctttccgctgtcctggcccacatggaggccacgggggtgcgcctggacgtggcctatctcagggccttgtccctggaggtggccgaggagatcgcccgcctcgaggccgaggtcttccgcctggccggccaccccttcaacctcaactcccgggaccagctggaaagggtcctctttgacgagctagggcttcccgccatcggcaagacggagaagaccggcaagcgctccaccagcgccgccgtcctggaggccctccgcgaggcccaccccatcgtggagaagatcctgcagtaccgggagctcaccaagctgaagagcacctacattgaccccttgccggacctcatccaccccaggacgggccgcctccacacccgcttcaaccagacggccacggccacgggcaggctaagtagctccgatcccaacctccagaacatccccgtacgcaccccgcttgggcagaggatccgccgggccttcatcgccgaggaggggtggctattggtggccctggactatagccagatagagctcagggtgctggcccacctctccggcgacgagaacctgatccgggtcttccaggaggggcgggacatccacacggagaccgccagctggatgttcggggtcccgcgggaggccgtggaccccctgatgcgctacgcggccaagaccatcaacttcggggtcctctacggcatgtcggcccaccgcctctcccaggagctagccatcccttacgaggaggcccaggccttcattgagcgctactttcagagcttccccaaggtgcgggcctggattgagaagaccctggaggagggcaggaggcgggggtacgtggagaccctcttcggccgccgccgctacgtgccagacctagaggcccgggtgaagagcgtgcgggaggcggccgagcgcatggccttcaacatgcccgtccagggcaccgccgccgacctcatgaagctggctatggtgaagctcttccccaggctggaggaaatgggggccaggatgctccttcaggtccacgacgagctggtcctcgaggccccaaaagagagggcggaggccgtggcccggctggccaaggaggtcatggagggggtgtatcccctggccgtgcccctggaggtggaggtggggataggggaggactggctctccgccaaggagtga

SEQ ID NO: 768 - protein, 863 aa, Artificial Sequence
  Description of Artificial Sequence:mutant Taq polymerase
MGGSHHHHHHGMARMTGGQQMGRDLYDDDDKMRGMLPLFEPKGRVLLVDGHHLAYRTFHALKGLTTSRGEPVQAVYGFAKSLLKALKEDGDAVIVVFDAKAPSFRHEAYGGYKAGRAPTPEDFPRQLALIKELVDLLGLARLEVPGYEADDVLASLAKKAEKEGYEVRILTADKDLYQLLSDRIHVLHPEGYLITPAWLWEKYGLRPDQWADYRALTGDESDNLPGVKGIGEKTARKLLEEWGSLEALLKNLDRLKPAIREKILAHMDDLKLSWDLAKVRTDLPLEVDFAKRREPDRERLRAFLERLEFGSLLHEFGLLESPKALEEAPWPPPEGAFVGFVLSRKEPMWADLLALAAARGGRVHRAPEPYKALRDLKEARGLLAKDLSVLALREGLGLPPGDDPMLLAYLLDPSNTTPEGVARRYGGEWTEEAGERAALSERLFANLWGRLEGEERLLWLYREVERPLSAVLAHMEATGVRLDVAYLRALSLEVAEEIARLEAEVFRLAGHPFNLNSRDQLERVLFDELGLPAIGKTEKTGKRSTSAAVLEALREAHPIVEKILQYRELTKLKSTYIDPLPDLIHPRTGRLHTRFNQTATATGRLSSSDPNLQNIPVRTPLGQRIRRAFIAEEGWLLVALDYSQIELRVLAHLSGDENLIRVFQEGRDIHTETASWMFGVPREAVDPLMRYAAKTINFGVLYGMSAHRLSQELAIPYEEAQAFIERYFQSFPKVRAWIEKTLEEGRRRGYVETLFGRRRYVPDLEARVKSVREAAERMAFNMPVQGTAADLMKLAMVKLFPRLEEMGARMLLQVHDELVLEAPKERAEAVARLAKEVMEGVYPLAVPLEVEVGIGEDWLSAKE

SEQ ID NO: 769 - DNA, 2592 bp, Artificial Sequence
  Description of Artificial Sequence:mutant Taq polymerase
atggggggttctcatcatcatcatcatcatggtatggctagaatgactggtggacagcaaatgggtcgggatctgtacgacgatgacgataagatgagagggatgctgcccctctttgagcccaagggccgggtcctcctggtggacggccaccacctggcctaccgcaccttccacgccctgaagggcctcaccaccagccggggggagccggtgcaggcggtctacggcttcgccaagagcctcctcaaggccctcaaggaggacggggacgcggtgatcgtggtctttgacgccaaggccccctccttccgccacgaggcctacggggggtacaaggcgggccgggcccccacgccggaggactttccccggcaactcgccctcatcaaggagctggtggacctcctggggctggcgcgcctcgaggtcccgggctacgaggcggacgacgtcctggccagcctggccaagaaggcggaaaaggagggctacgaggtccgcatcctcaccgccgacaaagacctttaccagctcctttccgaccgcatccacgtcctccaccccgaggggtacctcatcaccccggcctggctttgggaaaagtacggcctgaggcccgaccagtgggccgactaccgggccctgaccggggacgagtccgacaaccttcccggggtcaagggcatcggggagaagacggcgaggaagcttctggaggagtgggggagcctggaagccctcctcaagaacctggaccggctgaagcccgccatccgggagaagatcctggcccacatggacgatctgaagctctcctgggacctggccaaggtgcgcaccgacctgcccctggaggtggacttcgccaaaaggcgggagcccgaccgggagaggcttagggcctttctggagaggcttgagtttggcagcctcctccacgagttcggccttctggaaagccccaaggccctggaggaggccccctggcccccgccggaaggggccttcgtgggctttgtgctttcccgcaaggagcccatgtgggccgatcttctggccctggccgccgccagggggggccgggtccaccgggcccccgagccttataaagccctcagggacctgaaggaggcgcgggggcttctcgccaaagacctgagcgttctggccctgagggaaggccttggcctcccgcccggcgacgaccccatgctcctcgcctacctcctggacccttccaacaccacccccgagggggtggcccggcgctacggcggggagtggacggaggaggcgggggagcgggccgccctttccgagaggctcttcgccaacctgtgggggaggcttgagggggaggagaggctcctttggctttaccgggaggtggagaggcccctttccgctgtcctggcccacatggaggccacgggggtgcgcctggacgtggcctatctcagggccttgtccctggaggtggccgaggagatcgcccgcctcgaggccgaggtcttccgcctggccggccaccccttcaacctcaactcccgggaccagctggaaagggtcctctttgacgagctagggcttcccgccatcggcaagacggagaagaccggcaagcgctccaccagcgccgccgtcctggaggccctccgcgaggcccaccccatcgtggagaagatcctgcagtaccgggagctcaccaagctgaagagcacctacattgaccccttgccggacctcatccaccccaggacgggccgcctccacacccgcttcaaccagacggccacggccacgggcaggctaagtagctccgatcccaacctccagaacatccccgtacgcaccccgcttgggcagaggatccgccgggccttcatcgccgaggaggggtggctattggtggccctggactatagccagatagagctcagggtgctggcccacctctccggcgacgagaacctgatccgggtcttccaggaggggcgggacatccacacggagaccgccagctggatgttcggggtcccgcgggaggccgtggaccccctgatgcgccgggcgggtaagaccatcaacttcggggtcctctacggcatgtcggcccaccgcctctcccaggagctagccatcccttacgaggaggcccaggccttcattgagcgctactttcagagcttccccaaggtgcgggcctggattgagaagaccctggaggagggcaggaggcgggggtacgtggagaccctcttcggccgccgccgctacgtgccagacctagaggcccgggtgaagagcgtgcgggaggcggccgagcgcatggccttcaacatgcccgtccagggcaccgccgccgacctcatgaagctggctatggtgaagctcttccccaggctggaggaaatgggggccaggatgctccttcaggtccacgacgagctggtcctcgaggccccaaaagagagggcggaggccgtggcccggctggccaaggaggtcatggagggggtgtatcccctggccgtgcccctggaggtggaggtggggataggggaggactggctctccgccaaggagtga

SEQ ID NO: 770 - protein, 863 aa, Artificial Sequence
  Description of Artificial Sequence:mutant Taq polymerase
MGGSHHHHHHGMARMTGGQQMGRDLYDDDDKMRGMLPLFEPKGRVLLVDGHHLAYRTFHALKGLTTSRGEPVQAVYGFAKSLLKALKEDGDAVIVVFDAKAPSFRHEAYGGYKAGRAPTPEDFPRQLALIKELVDLLGLARLEVPGYEADDVLASLAKKAEKEGYEVRILTADKDLYQLLSDRIHVLHPEGYLITPAWLWEKYGLRPDQWADYRALTGDESDNLPGVKGIGEKTARKLLEEWGSLEALLKNLDRLKPAIREKILAHMDDLKLSWDLAKVRTDLPLEVDFAKRREPDRERLRAFLERLEFGSLLHEFGLLESPKALEEAPWPPPEGAFVGFVLSRKEPMWADLLALAAARGGRVHRAPEPYKALRDLKEARGLLAKDLSVLALREGLGLPPGDDPMLLAYLLDPSNTTPEGVARRYGGEWTEEAGERAALSERLFANLWGRLEGEERLLWLYREVERPLSAVLAHMEATGVRLDVAYLRALSLEVAEEIARLEAEVFRLAGHPFNLNSRDQLERVLFDELGLPAIGKTEKTGKRSTSAAVLEALREAHPIVEKILQYRELTKLKSTYIDPLPDLIHPRTGRLHTRFNQTATATGRLSSSDPNLQNIPVRTPLGQRIRRAFIAEEGWLLVALDYSQIELRVLAHLSGDENLIRVFQEGRDIHTETASWMFGVPREAVDPLMRRAGKTINFGVLYGMSAHRLSQELAIPYEEAQAFIERYFQSFPKVRAWIEKTLEEGRRRGYVETLFGRRRYVPDLEARVKSVREAAERMAFNMPVQGTAADLMKLAMVKLFPRLEEMGARMLLQVHDELVLEAPKERAEAVARLAKEVMEGVYPLAVPLEVEVGIGEDWLSAKE

SEQ ID NO: 771 - DNA, 2592 bp, Artificial Sequence
  Description of Artificial Sequence:mutant Taq polymerase
atggggggttctcatcatcatcatcatcatggtatggctagaatgactggtggacagcaaatgggtcgggatctgtacgacgatgacgataagatgagagggatgctgcccctctttgagcccaagggccgggtcctcctggtggacggccaccacctggcctaccgcaccttccacgccctgaagggcctcaccaccagccggggggagccggtgcaggcggtctacggcttcgccaagagcctcctcaaggccctcaaggaggacggggacgcggtgatcgtggtctttgacgccaaggccccctccttccgccacgaggcctacggggggtacaaggcgggccgggcccccacgccggaggactttccccggcaactcgccctcatcaaggagctggtggacctcctggggctggcgcgcctcgaggtcccgggctacgaggcggacgacgtcctggccagcctggccaagaaggcggaaaaggagggctacgaggtccgcatcctcaccgccgacaaagacctttaccagctcctttccgaccgcatccacgtcctccaccccgaggggtacctcatcaccccggcctggctttgggaaaagtacggcctgaggcccgaccagtgggccgactaccgggccctgaccggggacgagtccgacaaccttcccggggtcaagggcatcggggagaagacggcgaggaagcttctggaggagtgggggagcctggaagccctcctcaagaacctggaccggctgaagcccgccatccgggagaagatcctggcccacatggacgatctgaagctctcctgggacctggccaaggtgcgcaccgacctgcccctggaggtggacttcgccaaaaggcgggagcccgaccgggagaggcttagggcctttctggagaggcttgagtttggcagcctcctccacgagttcggccttctggaaagccccaaggccctggaggaggccccctggcccccgccggaaggggccttcgtgggctttgtgctttcccgcaaggagcccatgtgggccgatcttctggccctggccgccgccagggggggccgggtccaccgggcccccgagccttataaagccctcagggacctgaaggaggcgcgggggcttctcgccaaagacctgagcgttctggccctgagggaaggccttggcctcccgcccggcgacgaccccatgctcctcgcctacctcctggacccttccaacaccacccccgagggggtggcccggcgctacggcggggagtggacggaggaggcgggggagcgggccgccctttccgagaggctcttcgccaacctgtgggggaggcttgagggggaggagaggctcctttggctttaccgggaggtggagaggcccctttccgctgtcctggcccacatggaggccacgggggtgcgcctggacgtggcctatctcagggccttgtccctggaggtggccgaggagatcgcccgcctcgaggccgaggtcttccgcctggccggccaccccttcaacctcaactcccgggaccagctggaaagggtcctctttgacgagctagggcttcccgccatcggcaagacggagaagaccggcaagcgctccaccagcgccgccgtcctggaggccctccgcgaggcccaccccatcgtggagaagatcctgcagtaccgggagctcaccaagctgaagagcacctacattgaccccttgccggacctcatccaccccaggacgggccgcctccacacccgcttcaaccagacggccacggccacgggcaggctaagtagctccgatcccaacctccagaacatccccgtacgcaccccgcttgggcagaggatccgccgggccttcatcgccgaggaggggtggctattggtggccctggactatagccagatagagctcagggtgctggcccacctctccggcgacgagaacctgatccgggtcttccaggaggggcgggacatccacacggagaccgccagctggatgttcggggtcccgcgggaggccgtggaccccctgatgcgccgggcggccaagaccatcaacttcggggtcctctacggcatgtcggcccaccgcctctcccaggagctagccatcccttacgaggaggcccaggccttcattgagtcgtactttcagagcttccccaaggtgcgggcctggattgagaagaccctggaggagggcaggaggcgggggtacgtggagaccctcttcggccgccgccgctacgtgccagacctagaggcccgggtgaagagcgtgcgggaggcggccgagcgcatggccttcaacatgcccgtccagggcaccgccgccgacctcatgaagctggctatggtgaagctcttccccaggctggaggaaatgggggccaggatgctccttcaggtccacgacgagctggtcctcgaggccccaaaagagagggcggaggccgtggcccggctggccaaggaggtcatggagggggtgtatcccctggccgtgcccctggaggtggaggtggggataggggaggactggctctccgccaaggagtga

SEQ ID NO: 772 - protein, 863 aa, Artificial Sequence
  Description of Artificial Sequence:mutant Taq polymerase
MGGSHHHHHHGMARMTGGQQMGRDLYDDDDKMRGMLPLFEPKGRVLLVDGHHLAYRTFHALKGLTTSRGEPVQAVYGFAKSLLKALKEDGDAVIVVFDAKAPSFRHEAYGGYKAGRAPTPEDFPRQLALIKELVDLLGLARLEVPGYEADDVLASLAKKAEKEGYEVRILTADKDLYQLLSDRIHVLHPEGYLITPAWLWEKYGLRPDQWADYRALTGDESDNLPGVKGIGEKTARKLLEEWGSLEALLKNLDRLKPAIREKILAHMDDLKLSWDLAKVRTDLPLEVDFAKRREPDRERLRAFLERLEFGSLLHEFGLLESPKALEEAPWPPPEGAFVGFVLSRKEPMWADLLALAAARGGRVHRAPEPYKALRDLKEARGLLAKDLSVLALREGLGLPPGDDPMLLAYLLDPSNTTPEGVARRYGGEWTEEAGERAALSERLFANLWGRLEGEERLLWLYREVERPLSAVLAHMEATGVRLDVAYLRALSLEVAEEIARLEAEVFRLAGHPFNLNSRDQLERVLFDELGLPAIGKTEKTGKRSTSAAVLEALREAHPIVEKILQYRELTKLKSTYIDPLPDLIHPRTGRLHTRFNQTATATGRLSSSDPNLQNIPVRTPLGQRIRRAFIAEEGWLLVALDYSQIELRVLAHLSGDENLIRVFQEGRDIHTETASWMFGVPREAVDPLMRRAAKTINFGVLYGMSAHRLSQELAIPYEEAQAFIESYFQSFPKVRAWIEKTLEEGRRRGYVETLFGRRRYVPDLEARVKSVREAAERMAFNMPVQGTAADLMKLAMVKLFPRLEEMGARMLLQVHDELVLEAPKERAEAVARLAKEVMEGVYPLAVPLEVEVGIGEDWLSAKE

SEQ ID NO: 773 - DNA, 2592 bp, Artificial Sequence
  Description of Artificial Sequence:mutant Taq polymerase
atggggggttctcatcatcatcatcatcatggtatggctagaatgactggtggacagcaaatgggtcgggatctgtacgacgatgacgataagatgagagggatgctgcccctctttgagcccaagggccgggtcctcctggtggacggccaccacctggcctaccgcaccttccacgccctgaagggcctcaccaccagccggggggagccggtgcaggcggtctacggcttcgccaagagcctcctcaaggccctcaaggaggacggggacgcggtgatcgtggtctttgacgccaaggccccctccttccgccacgaggcctacggggggtacaaggcgggccgggcccccacgccggaggactttccccggcaactcgccctcatcaaggagctggtggacctcctggggctggcgcgcctcgaggtcccgggctacgaggcggacgacgtcctggccagcctggccaagaaggcggaaaaggagggctacgaggtccgcatcctcaccgccgacaaagacctttaccagctcctttccgaccgcatccacgtcctccaccccgaggggtacctcatcaccccggcctggctttgggaaaagtacggcctgaggcccgaccagtgggccgactaccgggccctgaccggggacgagtccgacaaccttcccggggtcaagggcatcggggagaagacggcgaggaagcttctggaggagtgggggagcctggaagccctcctcaagaacctggaccggctgaagcccgccatccgggagaagatcctggcccacatggacgatctgaagctctcctgggacctggccaaggtgcgcaccgacctgcccctggaggtggacttcgccaaaaggcgggagcccgaccgggagaggcttagggcctttctggagaggcttgagtttggcagcctcctccacgagttcggccttctggaaagccccaaggccctggaggaggccccctggcccccgccggaaggggccttcgtgggctttgtgctttcccgcaaggagcccatgtgggccgatcttctggccctggccgccgccagggggggccgggtccaccgggcccccgagccttataaagccctcagggacctgaaggaggcgcgggggcttctcgccaaagacctgagcgttctggccctgagggaaggccttggcctcccgcccggcgacgaccccatgctcctcgcctacctcctggacccttccaacaccacccccgagggggtggcccggcgctacggcggggagtggacggaggaggcgggggagcgggccgccctttccgagaggctcttcgccaacctgtgggggaggcttgagggggaggagaggctcctttggctttaccgggaggtggagaggcccctttccgctgtcctggcccacatggaggccacgggggtgcgcctggacgtggcctatctcagggccttgtccctggaggtggccgaggagatcgcccgcctcgaggccgaggtcttccgcctggccggccaccccttcaacctcaactcccgggaccagctggaaagggtcctctttgacgagctagggcttcccgccatcggcaagacggagaagaccggcaagcgctccaccagcgccgccgtcctggaggccctccgcgaggcccaccccatcgtggagaagatcctgcagtaccgggagctcaccaagctgaagagcacctacattgaccccttgccggacctcatccaccccaggacggaccgcctccacacccgcttcaaccagacggccacggccacgggcaggctaagtagctccgatcccaacctccagaacatccccgtacgcaccccgcttgggcagaggatccgccgggccttcatcgccgaggaggggtggctattggtggccctggactatagccagcacgagctcagggtgctggcccacctctccggcgacgagaacctgatccgggtcttccaggaggggcgggacatccacacggagaccgccagctggatgttcggggtcccgcgggaggccgtggaccccctgatgcgccgggcggccaagaccatcaacttcggggtcctctacggcatgtcggcccaccgcctctcccaggagctagccatcccttacgaggaggcccaggccttcattgagcgctactttcagagcttccccaaggtgcgggcctggattgagaagaccctggaggagggcaggaggcgggggtacgtggagaccctcttcggccgccgccgctacgtgccagacctagaggcccgggtgaagagcgtgcgggaggcggccgagcgcatggccttcaacatgcccgtccagggcaccgccgccgacctcatgaagctggctatggtgaagctcttccccaggctggaggaaatgggggccaggatgctccttcaggtccacgacgagctggtcctcgaggccccaaaagagagggcggaggccgtggcccggctggccaaggaggtcatggagggggtgtatcccctggccgtgcccctggaggtggaggtggggataggggaggactggctctccgccaaggagtga

SEQ ID NO: 774 - protein, 863 aa, Artificial Sequence
  Description of Artificial Sequence:mutant Taq polymerase
MGGSHHHHHHGMARMTGGQQMGRDLYDDDDKMRGMLPLFEPKGRVLLVDGHHLAYRTFHALKGLTTSRGEPVQAVYGFAKSLLKALKEDGDAVIVVFDAKAPSFRHEAYGGYKAGRAPTPEDFPRQLALIKELVDLLGLARLEVPGYEADDVLASLAKKAEKEGYEVRILTADKDLYQLLSDRIHVLHPEGYLITPAWLWEKYGLRPDQWADYRALTGDESDNLPGVKGIGEKTARKLLEEWGSLEALLKNLDRLKPAIREKILAHMDDLKLSWDLAKVRTDLPLEVDFAKRREPDRERLRAFLERLEFGSLLHEFGLLESPKALEEAPWPPPEGAFVGFVLSRKEPMWADLLALAAARGGRVHRAPEPYKALRDLKEARGLLAKDLSVLALREGLGLPPGDDPMLLAYLLDPSNTTPEGVARRYGGEWTEEAGERAALSERLFANLWGRLEGEERLLWLYREVERPLSAVLAHMEATGVRLDVAYLRALSLEVAEEIARLEAEVFRLAGHPFNLNSRDQLERVLFDELGLPAIGKTEKTGKRSTSAAVLEALREAHPIVEKILQYRELTKLKSTYIDPLPDLIHPRTDRLHTRFNQTATATGRLSSSDPNLQNIPVRTPLGQRIRRAFIAEEGWLLVALDYSQHELRVLAHLSGDENLIRVFQEGRDIHTETASWMFGVPREAVDPLMRRAAKTINFGVLYGMSAHRLSQELAIPYEEAQAFIERYFQSFPKVRAWIEKTLEEGRRRGYVETLFGRRRYVPDLEARVKSVREAAERMAFNMPVQGTAADLMKLAMVKLFPRLEEMGARMLLQVHDELVLEAPKERAEAVARLAKEVMEGVYPLAVPLEVEVGIGEDWLSAKE

SEQ ID NO: 775 - DNA, 2592 bp, Artificial Sequence
  Description of Artificial Sequence:mutant Taq polymerase
atggggggttctcatcatcatcatcatcatggtatggctagaatgactggtggacagcaaatgggtcgggatctgtacgacgatgacgataagatgagagggatgctgcccctctttgagcccaagggccgggtcctcctggtggacggccaccacctggcctaccgcaccttccacgccctgaagggcctcaccaccagccggggggagccggtgcaggcggtctacggcttcgccaagagcctcctcaaggccctcaaggaggacggggacgcggtgatcgtggtctttgacgccaaggccccctccttccgccacgaggcctacggggggtacaaggcgggccgggcccccacgccggaggactttccccggcaactcgccctcatcaaggagctggtggacctcctggggctggcgcgcctcgaggtcccgggctacgaggcggacgacgtcctggccagcctggccaagaaggcggaaaaggagggctacgaggtccgcatcctcaccgccgacaaagacctttaccagctcctttccgaccgcatccacgtcctccaccccgaggggtacctcatcaccccggcctggctttgggaaaagtacggcctgaggcccgaccagtgggccgactaccgggccctgaccggggacgagtccgacaaccttcccggggtcaagggcatcggggagaagacggcgaggaagcttctggaggagtgggggagcctggaagccctcctcaagaacctggaccggctgaagcccgccatccgggagaagatcctggcccacatggacgatctgaagctctcctgggacctggccaaggtgcgcaccgacctgcccctggaggtggacttcgccaaaaggcgggagcccgaccgggagaggcttagggcctttctggagaggcttgagtttggcagcctcctccacgagttcggccttctggaaagccccaaggccctggaggaggccccctggcccccgccggaaggggccttcgtgggctttgtgctttcccgcaaggagcccatgtgggccgatcttctggccctggccgccgccagggggggccgggtccaccgggcccccgagccttataaagccctcagggacctgaaggaggcgcgggggcttctcgccaaagacctgagcgttctggccctgagggaaggccttggcctcccgcccggcgacgaccccatgctcctcgcctacctcctggacccttccaacaccacccccgagggggtggcccggcgctacggcggggagtggacggaggaggcgggggagcgggccgccctttccgagaggctcttcgccaacctgtgggggaggcttgagggggaggagaggctcctttggctttaccgggaggtggagaggcccctttccgctgtcctggcccacatggaggccacgggggtgcgcctggacgtggcctatctcagggccttgtccctggaggtggccgaggagatcgcccgcctcgaggccgaggtcttccgcctggccggccaccccttcaacctcaactcccgggaccagctggaaagggtcctctttgacgagctagggcttcccgccatcggcaagacggagaagaccggcaagcgctccaccagcgccgccgtcctggaggccctccgcgaggcccaccccatcgtggagaagatcctgcagtaccgggagctcaccaagctgaagagcacctacattgaccccttgccggacctcatccaccccaggacgggccgcctccacacccgcttcaaccagacggccacggccacgggcaggctaagtagctccgatcccaacctccagaacatccccgtacgcaccccgcttgggcagaggatccgccgggccttcatcgccgaggaggggtggctattggtggccctggactatagccagttcgagctcagggtgctggcccacctctccggcgacgagaacctgatccgggtcttccaggaggggcgggacatccacacggagaccgccagctggatgttcggggtcccgcgggaggccgtggaccccctgatgcgccgggcggccaagaccatcaacttcggggtcctctacggcatgtcggcccaccgcctctcccaggagctagccatcccttacgaggaggcccaggccttcattgagcgctactttcagagcttccccaaggtgcgggcctggattgagaagaccctggaggagggcaggaggcgggggtacgtggagaccctcttcggccgccgccgctacgtgccagacctagaggcccgggtgaagagcgtgcgggaggcggccgagcgcatggccttcaacatgcccgtccagggcaccgccgccgacctcatgaagctggctatggtgaagctcttccccaggctggaggaaatgggggccaggatgctccttcaggtccacgacgagctggtcctcgaggccccaaaagagagggcggaggccgtggcccggctggccaaggaggtcatggagggggtgtatcccctggccgtgcccctggaggtggaggtggggataggggaggactggctctccgccaaggagtga

SEQ ID NO: 776 - protein, 863 aa, Artificial Sequence
  Description of Artificial Sequence:mutant Taq polymerase
MGGSHHHHHHGMARMTGGQQMGRDLYDDDDKMRGMLPLFEPKGRVLLVDGHHLAYRTFHALKGLTTSRGEPVQAVYGFAKSLLKALKEDGDAVIVVFDAKAPSFRHEAYGGYKAGRAPTPEDFPRQLALIKELVDLLGLARLEVPGYEADDVLASLAKKAEKEGYEVRILTADKDLYQLLSDRIHVLHPEGYLITPAWLWEKYGLRPDQWADYRALTGDESDNLPGVKGIGEKTARKLLEEWGSLEALLKNLDRLKPAIREKILAHMDDLKLSWDLAKVRTDLPLEVDFAKRREPDRERLRAFLERLEFGSLLHEFGLLESPKALEEAPWPPPEGAFVGFVLSRKEPMWADLLALAAARGGRVHRAPEPYKALRDLKEARGLLAKDLSVLALREGLGLPPGDDPMLLAYLLDPSNTTPEGVARRYGGEWTEEAGERAALSERLFANLWGRLEGEERLLWLYREVERPLSAVLAHMEATGVRLDVAYLRALSLEVAEEIARLEAEVFRLAGHPFNLNSRDQLERVLFDELGLPAIGKTEKTGKRSTSAAVLEALREAHPIVEKILQYRELTKLKSTYIDPLPDLIHPRTGRLHTRFNQTATATGRLSSSDPNLQNIPVRTPLGQRIRRAFIAEEGWLLVALDYSQFELRVLAHLSGDENLIRVFQEGRDIHTETASWMFGVPREAVDPLMRRAAKTINFGVLYGMSAHRLSQELAIPYEEAQAFIERYFQSFPKVRAWIEKTLEEGRRRGYVETLFGRRRYVPDLEARVKSVREAAERMAFNMPVQGTAADLMKLAMVKLFPRLEEMGARMLLQVHDELVLEAPKERAEAVARLAKEVMEGVYPLAVPLEVEVGIGEDWLSAKE

SEQ ID NO: 777 - DNA, 2592 bp, Artificial Sequence
  Description of Artificial Sequence:mutant Taq polymerase
atggggggttctcatcatcatcatcatcatggtatggctagaatgactggtggacagcaaatgggtcgggatctgtacgacgatgacgataagatgagagggatgctgcccctctttgagcccaagggccgggtcctcctggtggacggccaccacctggcctaccgcaccttccacgccctgaagggcctcaccaccagccggggggagccggtgcaggcggtctacggcttcgccaagagcctcctcaaggccctcaaggaggacggggacgcggtgatcgtggtctttgacgccaaggccccctccttccgccacgaggcctacggggggtacaaggcgggccgggcccccacgccggaggactttccccggcaactcgccctcatcaaggagctggtggacctcctggggctggcgcgcctcgaggtcccgggctacgaggcggacgacgtcctggccagcctggccaagaaggcggaaaaggagggctacgaggtccgcatcctcaccgccgacaaagacctttaccagctcctttccgaccgcatccacgtcctccaccccgaggggtacctcatcaccccggcctggctttgggaaaagtacggcctgaggcccgaccagtgggccgactaccgggccctgaccggggacgagtccgacaaccttcccggggtcaagggcatcggggagaagacggcgaggaagcttctggaggagtgggggagcctggaagccctcctcaagaacctggaccggctgaagcccgccatccgggagaagatcctggcccacatggacgatctgaagctctcctgggacctggccaaggtgcgcaccgacctgcccctggaggtggacttcgccaaaaggcgggagcccgaccgggagaggcttagggcctttctggagaggcttgagtttggcagcctcctccacgagttcggccttctggaaagccccaaggccctggaggaggccccctggcccccgccggaaggggccttcgtgggctttgtgctttcccgcaaggagcccatgtgggccgatcttctggccctggccgccgccagggggggccgggtccaccgggcccccgagccttataaagccctcagggacctgaaggaggcgcgggggcttctcgccaaagacctgagcgttctggccctgagggaaggccttggcctcccgcccggcgacgaccccatgctcctcgcctacctcctggacccttccaacaccacccccgagggggtggcccggcgctacggcggggagtggacggaggaggcgggggagcgggccgccctttccgagaggctcttcgccaacctgtgggggaggcttgagggggaggagaggctcctttggctttaccgggaggtggagaggcccctttccgctgtcctggcccacatggaggccacgggggtgcgcctggacgtggcctatctcagggccttgtccctggaggtggccgaggagatcgcccgcctcgaggccgaggtcttccgcctggccggccaccccttcaacctcaactcccgggaccagctggaaagggtcctctttgacgagctagggcttcccgccatcggcaagacggagaagaccggcaagcgctccaccagcgccgccgtcctggaggccctccgcgaggcccaccccatcgtggagaagatcctgcagtaccgggagctcaccaagctgaagagcacctacattgaccccttgccggacctcatccaccccaggacgggccgcctccacacccgcttcaaccagacggccacggccacgggcaggctaagtagctccgatcccaacctccagaacatccccgtacgcaccccgcttgggcagaggatccgccgggccttcatcgccgaggaggggtggctattggtggccctggactatagccagcacgagctcagggtgctggcccacctctccggcgacgagaacctgatccgggtcttccaggaggggcgggacatccacacggagaccgccagctggatgttcggggtcccgcgggaggccgtggaccccctgatgcgccgggcggccaagaccatcaacttcggggtcctctacggcatgtcggcccaccgcctctcccaggagctagccatcccttacgaggaggcccaggccttcattgagcgctactttcagagcttccccaaggtgcgggcctggattgagaagaccctggaggagggcaggaggcgggggtacgtggagaccctcttcggccgccgccgctacgtgccagacctagaggcccgggtgaagagcgtgcgggaggcggccgagcgcatggccttcaacatgcccgtccagggcaccgccgccgacctcatgaagctggctatggtgaagctcttccccaggctggaggaaatgggggccaggatgctccttcaggtccacgacgagctggtcctcgaggccccaaaagagagggcggaggccgtggcccggctggccaaggaggtcatggagggggtgtatcccctggccgtgcccctggaggtggaggtggggataggggaggactggctctccgccaaggagtga

SEQ ID NO: 778 - protein, 863 aa, Artificial Sequence
  Description of Artificial Sequence:mutant Taq polymerase
MGGSHHHHHHGMARMTGGQQMGRDLYDDDDKMRGMLPLFEPKGRVLLVDGHHLAYRTFHALKGLTTSRGEPVQAVYGFAKSLLKALKEDGDAVIVVFDAKAPSFRHEAYGGYKAGRAPTPEDFPRQLALIKELVDLLGLARLEVPGYEADDVLASLAKKAEKEGYEVRILTADKDLYQLLSDRIHVLHPEGYLITPAWLWEKYGLRPDQWADYRALTGDESDNLPGVKGIGEKTARKLLEEWGSLEALLKNLDRLKPAIREKILAHMDDLKLSWDLAKVRTDLPLEVDFAKRREPDRERLRAFLERLEFGSLLHEFGLLESPKALEEAPWPPPEGAFVGFVLSRKEPMWADLLALAAARGGRVHRAPEPYKALRDLKEARGLLAKDLSVLALREGLGLPPGDDPMLLAYLLDPSNTTPEGVARRYGGEWTEEAGERAALSERLFANLWGRLEGEERLLWLYREVERPLSAVLAHMEATGVRLDVAYLRALSLEVAEEIARLEAEVFRLAGHPFNLNSRDQLERVLFDELGLPAIGKTEKTGKRSTSAAVLEALREAHPIVEKILQYRELTKLKSTYIDPLPDLIHPRTGRLHTRFNQTATATGRLSSSDPNLQNIPVRTPLGQRIRRAFIAEEGWLLVALDYSQHELRVLAHLSGDENLIRVFQEGRDIHTETASWMFGVPREAVDPLMRRAAKTINFGVLYGMSAHRLSQELAIPYEEAQAFIERYFQSFPKVRAWIEKTLEEGRRRGYVETLFGRRRYVPDLEARVKSVREAAERMAFNMPVQGTAADLMKLAMVKLFPRLEEMGARMLLQVHDELVLEAPKERAEAVARLAKEVMEGVYPLAVPLEVEVGIGEDWLSAKE

SEQ ID NO: 779 - DNA, 2592 bp, Artificial Sequence
  Description of Artificial Sequence:mutant Taq polymerase
atggggggttctcatcatcatcatcatcatggtatggctagaatgactggtggacagcaaatgggtcgggatctgtacgacgatgacgataagatgagagggatgctgcccctctttgagcccaagggccgggtcctcctggtggacggccaccacctggcctaccgcaccttccacgccctgaagggcctcaccaccagccggggggagccggtgcaggcggtctacggcttcgccaagagcctcctcaaggccctcaaggaggacggggacgcggtgatcgtggtctttgacgccaaggccccctccttccgccacgaggcctacggggggtacaaggcgggccgggcccccacgccggaggactttccccggcaactcgccctcatcaaggagctggtggacctcctggggctggcgcgcctcgaggtcccgggctacgaggcggacgacgtcctggccagcctggccaagaaggcggaaaaggagggctacgaggtccgcatcctcaccgccgacaaagacctttaccagctcctttccgaccgcatccacgtcctccaccccgaggggtacctcatcaccccggcctggctttgggaaaagtacggcctgaggcccgaccagtgggccgactaccgggccctgaccggggacgagtccgacaaccttcccggggtcaagggcatcggggagaagacggcgaggaagcttctggaggagtgggggagcctggaagccctcctcaagaacctggaccggctgaagcccgccatccgggagaagatcctggcccacatggacgatctgaagctctcctgggacctggccaaggtgcgcaccgacctgcccctggaggtggacttcgccaaaaggcgggagcccgaccgggagaggcttagggcctttctggagaggcttgagtttggcagcctcctccacgagttcggccttctggaaagccccaaggccctggaggaggccccctggcccccgccggaaggggccttcgtgggctttgtgctttcccgcaaggagcccatgtgggccgatcttctggccctggccgccgccagggggggccgggtccaccgggcccccgagccttataaagccctcagggacctgaaggaggcgcgggggcttctcgccaaagacctgagcgttctggccctgagggaaggccttggcctcccgcccggcgacgaccccatgctcctcgcctacctcctggacccttccaacaccacccccgagggggtggcccggcgctacggcggggagtggacggaggaggcgggggagcgggccgccctttccgagaggctcttcgccaacctgtgggggaggcttgagggggaggagaggctcctttggctttaccgggaggtggagaggcccctttccgctgtcctggcccacatggaggccacgggggtgcgcctggacgtggcctatctcagggccttgtccctggaggtggccgaggagatcgcccgcctcgaggccgaggtcttccgcctggccggccaccccttcaacctcaactcccgggaccagctggaaagggtcctctttgacgagctagggcttcccgccatcggcaagacggagaagaccggcaagcgctccaccagcgccgccgtcctggaggccctccgcgaggcccaccccatcgtggagaagatcctgcagtaccgggagctcaccaagctgaagagcacctacattgaccccttgccggacctcatccaccccaggacgggccgcctccacacccgcttcaaccagacggccacggccacgggcaggctaagtagctccgatcccaacctccagaacatccccgtacgcaccccgcttgggcagaggatccgccgggccttcatcgccgaggaggggtggctattggtggccctggactatagccagaaagagctcagggtgctggcccacctctccggcgacgagaacctgatccgggtcttccaggaggggcgggacatccacacggagaccgccagctggatgttcggggtcccgcgggaggccgtggaccccctgatgcgccgggcggccaagaccatcaacttcggggtcctctacggcatgtcggcccaccgcctctcccaggagctagccatcccttacgaggaggcccaggccttcattgagcgctactttcagagcttccccaaggtgcgggcctggattgagaagaccctggaggagggcaggaggcgggggtacgtggagaccctcttcggccgccgccgctacgtgccagacctagaggcccgggtgaagagcgtgcgggaggcggccgagcgcatggccttcaacatgcccgtccagggcaccgccgccgacctcatgaagctggctatggtgaagctcttccccaggctggaggaaatgggggccaggatgctccttcaggtccacgacgagctggtcctcgaggccccaaaagagagggcggaggccgtggcccggctggccaaggaggtcatggagggggtgtatcccctggccgtgcccctggaggtggaggtggggataggggaggactggctctccgccaaggagtga

SEQ ID NO: 780 - protein, 863 aa, Artificial Sequence
  Description of Artificial Sequence:mutant Taq polymerase
MGGSHHHHHHGMARMTGGQQMGRDLYDDDDKMRGMLPLFEPKGRVLLVDGHHLAYRTFHALKGLTTSRGEPVQAVYGFAKSLLKALKEDGDAVIVVFDAKAPSFRHEAYGGYKAGRAPTPEDFPRQLALIKELVDLLGLARLEVPGYEADDVLASLAKKAEKEGYEVRILTADKDLYQLLSDRIHVLHPEGYLITPAWLWEKYGLRPDQWADYRALTGDESDNLPGVKGIGEKTARKLLEEWGSLEALLKNLDRLKPAIREKILAHMDDLKLSWDLAKVRTDLPLEVDFAKRREPDRERLRAFLERLEFGSLLHEFGLLESPKALEEAPWPPPEGAFVGFVLSRKEPMWADLLALAAARGGRVHRAPEPYKALRDLKEARGLLAKDLSVLALREGLGLPPGDDPMLLAYLLDPSNTTPEGVARRYGGEWTEEAGERAALSERLFANLWGRLEGEERLLWLYREVERPLSAVLAHMEATGVRLDVAYLRALSLEVAEEIARLEAEVFRLAGHPFNLNSRDQLERVLFDELGLPAIGKTEKTGKRSTSAAVLEALREAHPIVEKILQYRELTKLKSTYIDPLPDLIHPRTGRLHTRFNQTATATGRLSSSDPNLQNIPVRTPLGQRIRRAFIAEEGWLLVALDYSQKELRVLAHLSGDENLIRVFQEGRDIHTETASWMFGVPREAVDPLMRRAAKTINFGVLYGMSAHRLSQELAIPYEEAQAFIERYFQSFPKVRAWIEKTLEEGRRRGYVETLFGRRRYVPDLEARVKSVREAAERMAFNMPVQGTAADLMKLAMVKLFPRLEEMGARMLLQVHDELVLEAPKERAEAVARLAKEVMEGVYPLAVPLEVEVGIGEDWLSAKE

SEQ ID NO: 781 - DNA, 2592 bp, Artificial Sequence
  Description of Artificial Sequence:mutant Taq polymerase
atggggggttctcatcatcatcatcatcatggtatggctagaatgactggtggacagcaaatgggtcgggatctgtacgacgatgacgataagatgagagggatgctgcccctctttgagcccaagggccgggtcctcctggtggacggccaccacctggcctaccgcaccttccacgccctgaagggcctcaccaccagccggggggagccggtgcaggcggtctacggcttcgccaagagcctcctcaaggccctcaaggaggacggggacgcggtgatcgtggtctttgacgccaaggccccctccttccgccacgaggcctacggggggtacaaggcgggccgggcccccacgccggaggactttccccggcaactcgccctcatcaaggagctggtggacctcctggggctggcgcgcctcgaggtcccgggctacgaggcggacgacgtcctggccagcctggccaagaaggcggaaaaggagggctacgaggtccgcatcctcaccgccgacaaagacctttaccagctcctttccgaccgcatccacgtcctccaccccgaggggtacctcatcaccccggcctggctttgggaaaagtacggcctgaggcccgaccagtgggccgactaccgggccctgaccggggacgagtccgacaaccttcccggggtcaagggcatcggggagaagacggcgaggaagcttctggaggagtgggggagcctggaagccctcctcaagaacctggaccggctgaagcccgccatccgggagaagatcctggcccacatggacgatctgaagctctcctgggacctggccaaggtgcgcaccgacctgcccctggaggtggacttcgccaaaaggcgggagcccgaccgggagaggcttagggcctttctggagaggcttgagtttggcagcctcctccacgagttcggccttctggaaagccccaaggccctggaggaggccccctggcccccgccggaaggggccttcgtgggctttgtgctttcccgcaaggagcccatgtgggccgatcttctggccctggccgccgccagggggggccgggtccaccgggcccccgagccttataaagccctcagggacctgaaggaggcgcgggggcttctcgccaaagacctgagcgttctggccctgagggaaggccttggcctcccgcccggcgacgaccccatgctcctcgcctacctcctggacccttccaacaccacccccgagggggtggcccggcgctacggcggggagtggacggaggaggcgggggagcgggccgccctttccgagaggctcttcgccaacctgtgggggaggcttgagggggaggagaggctcctttggctttaccgggaggtggagaggcccctttccgctgtcctggcccacatggaggccacgggggtgcgcctggacgtggcctatctcagggccttgtccctggaggtggccgaggagatcgcccgcctcgaggccgaggtcttccgcctggccggccaccccttcaacctcaactcccgggaccagctggaaagggtcctctttgacgagctagggcttcccgccatcggcaagacggagaagaccggcaagcgctccaccagcgccgccgtcctggaggccctccgcgaggcccaccccatcgtggagaagatcctgcagtaccgggagctcaccaagctgaagagcacctacattgaccccttgccggacctcatccaccccaggacgggccgcctccacacccgcttcaaccagacggccacggccacgggcaggctaagtagctccgatcccaacctccagaacatccccatccgcaccccgcttgggcagaggatccgccgggccttcatcgccgaggaggggtggctattggtggccctggactatagccagatagagctcagggtgctggcccacctctccggcgacgagaacctgatccgggtcttccaggaggggcgggacatccacacggagaccgccagctggatgttcggggtcccgcgggaggccgtggaccccctgatgcgccgggcggccaagaccatcaacttcggggtcctctacggcatgtcggcccaccgcctctcccaggagctagccatcccttacgaggaggcccaggccttcattgagcgctactttcagagcttccccaaggtgcgggcctggattgagaagaccctggaggagggcaggaggcgggggtacgtggagaccctcttcggccgccgccgctacgtgccagacctagaggcccgggtgaagagcgtgcgggaggcggccgagcgcatggccttcaacatgcccgtccagggcaccgccgccgacctcatgaagctggctatggtgaagctcttccccaggctggaggaaatgggggccaggatgctccttcaggtccacgacgagctggtcctcgaggccccaaaagagagggcggaggccgtggcccggctggccaaggaggtcatggagggggtgtatcccctggccgtgcccctggaggtggaggtggggataggggaggactggctctccgccaaggagtga

SEQ ID NO: 782 - protein, 863 aa, Artificial Sequence
  Description of Artificial Sequence:mutant Taq polymerase
MGGSHHHHHHGMARMTGGQQMGRDLYDDDDKMRGMLPLFEPKGRVLLVDGHHLAYRTFHALKGLTTSRGEPVQAVYGFAKSLLKALKEDGDAVIVVFDAKAPSFRHEAYGGYKAGRAPTPEDFPRQLALIKELVDLLGLARLEVPGYEADDVLASLAKKAEKEGYEVRILTADKDLYQLLSDRIHVLHPEGYLITPAWLWEKYGLRPDQWADYRALTGDESDNLPGVKGIGEKTARKLLEEWGSLEALLKNLDRLKPAIREKILAHMDDLKLSWDLAKVRTDLPLEVDFAKRREPDRERLRAFLERLEFGSLLHEFGLLESPKALEEAPWPPPEGAFVGFVLSRKEPMWADLLALAAARGGRVHRAPEPYKALRDLKEARGLLAKDLSVLALREGLGLPPGDDPMLLAYLLDPSNTTPEGVARRYGGEWTEEAGERAALSERLFANLWGRLEGEERLLWLYREVERPLSAVLAHMEATGVRLDVAYLRALSLEVAEEIARLEAEVFRLAGHPFNLNSRDQLERVLFDELGLPAIGKTEKTGKRSTSAAVLEALREAHPIVEKILQYRELTKLKSTYIDPLPDLIHPRTGRLHTRFNQTATATGRLSSSDPNLQNIPIRTPLGQRIRRAFIAEEGWLLVALDYSQIELRVLAHLSGDENLIRVFQEGRDIHTETASWMFGVPREAVDPLMRRAAKTINFGVLYGMSAHRLSQELAIPYEEAQAFIERYFQSFPKVRAWIEKTLEEGRRRGYVETLFGRRRYVPDLEARVKSVREAAERMAFNMPVQGTAADLMKLAMVKLFPRLEEMGARMLLQVHDELVLEAPKERAEAVARLAKEVMEGVYPLAVPLEVEVGIGEDWLSAKE

SEQ ID NO: 783 - DNA, 2592 bp, Artificial Sequence
  Description of Artificial Sequence:mutant Taq polymerase
atggggggttctcatcatcatcatcatcatggtatggctagaatgactggtggacagcaaatgggtcgggatctgtacgacgatgacgataagatgagagggatgctgcccctctttgagcccaagggccgggtcctcctggtggacggccaccacctggcctaccgcaccttccacgccctgaagggcctcaccaccagccggggggagccggtgcaggcggtctacggcttcgccaagagcctcctcaaggccctcaaggaggacggggacgcggtgatcgtggtctttgacgccaaggccccctccttccgccacgaggcctacggggggtacaaggcgggccgggcccccacgccggaggactttccccggcaactcgccctcatcaaggagctggtggacctcctggggctggcgcgcctcgaggtcccgggctacgaggcggacgacgtcctggccagcctggccaagaaggcggaaaaggagggctacgaggtccgcatcctcaccgccgacaaagacctttaccagctcctttccgaccgcatccacgtcctccaccccgaggggtacctcatcaccccggcctggctttgggaaaagtacggcctgaggcccgaccagtgggccgactaccgggccctgaccggggacgagtccgacaaccttcccggggtcaagggcatcggggagaagacggcgaggaagcttctggaggagtgggggagcctggaagccctcctcaagaacctggaccggctgaagcccgccatccgggagaagatcctggcccacatggacgatctgaagctctcctgggacctggccaaggtgcgcaccgacctgcccctggaggtggacttcgccaaaaggcgggagcccgaccgggagaggcttagggcctttctggagaggcttgagtttggcagcctcctccacgagttcggccttctggaaagccccaaggccctggaggaggccccctggcccccgccggaaggggccttcgtgggctttgtgctttcccgcaaggagcccatgtgggccgatcttctggccctggccgccgccagggggggccgggtccaccgggcccccgagccttataaagccctcagggacctgaaggaggcgcgggggcttctcgccaaagacctgagcgttctggccctgagggaaggccttggcctcccgcccggcgacgaccccatgctcctcgcctacctcctggacccttccaacaccacccccgagggggtggcccggcgctacggcggggagtggacggaggaggcgggggagcgggccgccctttccgagaggctcttcgccaacctgtgggggaggcttgagggggaggagaggctcctttggctttaccgggaggtggagaggcccctttccgctgtcctggcccacatggaggccacgggggtgcgcctggacgtggcctatctcagggccttgtccctggaggtggccgaggagatcgcccgcctcgaggccgaggtcttccgcctggccggccaccccttcaacctcaactcccgggaccagctggaaagggtcctctttgacgagctagggcttcccgccatcggcaagacggagaagaccggcaagcgctccaccagcgccgccgtcctggaggccctccgcgaggcccaccccatcgtggagaagatcctgcagtaccgggagctcaccaagctgaagagcacctacattgaccccttgccggacctcatccaccccaggacgggccgcctccacacccgcttcaaccagacggccacggccacgggcaggctaagtagctccgatcccaacctccagaacatccccgtacgcaccccgcttgggcagaggatccgccgggccttcatcgccgaggaggggtggctattggtggccctggactatagccagtgggagctcagggtgctggcccacctctccggcgacgagaacctgatccgggtcttccaggaggggcgggacatccacacggagaccgccagctggatgttcggggtcccgcgggaggccgtggaccccctgatgcgccgggcggccaagaccatcaacttcggggtcctctacggcatgtcggcccaccgcctctcccaggagctagccatcccttacgaggaggcccaggccttcattgagcgctactttcagagcttccccaaggtgcgggcctggattgagaagaccctggaggagggcaggaggcgggggtacgtggagaccctcttcggccgccgccgctacgtgccagacctagaggcccgggtgaagagcgtgcgggaggcggccgagcgcatggccttcaacatgcccgtccagggcaccgccgccgacctcatgaagctggctatggtgaagctcttccccaggctggaggaaatgggggccaggatgctccttcaggtccacgacgagctggtcctcgaggccccaaaagagagggcggaggccgtggcccggctggccaaggaggtcatggagggggtgtatcccctggccgtgcccctggaggtggaggtggggataggggaggactggctctccgccaaggagtga

SEQ ID NO: 784 - protein, 863 aa, Artificial Sequence
  Description of Artificial Sequence:mutant Taq polymerase
MGGSHHHHHHGMARMTGGQQMGRDLYDDDDKMRGMLPLFEPKGRVLLVDGHHLAYRTFHALKGLTTSRGEPVQAVYGFAKSLLKALKEDGDAVIVVFDAKAPSFRHEAYGGYKAGRAPTPEDFPRQLALIKELVDLLGLARLEVPGYEADDVLASLAKKAEKEGYEVRILTADKDLYQLLSDRIHVLHPEGYLITPAWLWEKYGLRPDQWADYRALTGDESDNLPGVKGIGEKTARKLLEEWGSLEALLKNLDRLKPAIREKILAHMDDLKLSWDLAKVRTDLPLEVDFAKRREPDRERLRAFLERLEFGSLLHEFGLLESPKALEEAPWPPPEGAFVGFVLSRKEPMWADLLALAAARGGRVHRAPEPYKALRDLKEARGLLAKDLSVLALREGLGLPPGDDPMLLAYLLDPSNTTPEGVARRYGGEWTEEAGERAALSERLFANLWGRLEGEERLLWLYREVERPLSAVLAHMEATGVRLDVAYLRALSLEVAEEIARLEAEVFRLAGHPFNLNSRDQLERVLFDELGLPAIGKTEKTGKRSTSAAVLEALREAHPIVEKILQYRELTKLKSTYIDPLPDLIHPRTGRLHTRFNQTATATGRLSSSDPNLQNIPVRTPLGQRIRRAFIAEEGWLLVALDYSQWELRVLAHLSGDENLIRVFQEGRDIHTETASWMFGVPREAVDPLMRRAAKTINFGVLYGMSAHRLSQELAIPYEEAQAFIERYFQSFPKVRAWIEKTLEEGRRRGYVETLFGRRRYVPDLEARVKSVREAAERMAFNMPVQGTAADLMKLAMVKLFPRLEEMGARMLLQVHDELVLEAPKERAEAVARLAKEVMEGVYPLAVPLEVEVGIGEDWLSAKE

SEQ ID NO: 785 - DNA, 2408 bp, Thermococcus sp.
  9degreesN polymerase, Thermococcus sp. strain 9degreesN-7 DNA polymerase A (PolA), no inteins
  CDS (40)..(2367): 9degreesN polymerase, Thermococcus sp. strain 9degreesN-7 DNA polymerase A (PolA), no inteins
tccagagttgttttacgaggttatgggtggtgagttctcatgattctcgataccgactacatcaccgagaacgggaagcccgtgataagggtcttcaagaaggagaacggcgagtttaaaatcgagtacgacagaaccttcgagccctacttctacgcccttctgaaggacgattctgcgatagaggacgtcaagaaggtaaccgcaaagaggcacggaacggttgtcaaggtgaagcgcgccgagaaggtgcagaagaagttcctcggcaggccgatagaggtctggaagctctacttcaaccatcctcaggacgtcccggcgattcgagacaggatacgcgcccaccccgctgtcgttgacatctacgagtacgacatacccttcgccaagcgctacctcatcgacaagggcctgattccgatggagggcgacgaggagcttacgatgctcgccttcgacatcgaaacgctctatcacgagggcgaggagttcggaaccgggccgattctcatgataagctacgccgacgggagcgaggcgagggtgataacctggaagaagattgaccttccgtacgttgacgtcgtctcgaccgagaaggagatgattaagcgcttcctccgcgtcgtcagggagaaggaccccgacgtgctcatcacctacaacggcgacaacttcgacttcgcctacctgaagaagcgctgtgaggaactcggaataaagttcacactcggcagggacgggagcgagccgaagatacagcgaatgggcgaccgctttgccgttgaggtgaagggcaggattcacttcgacctctaccccgtcataaggcgcacgataaacctcccgacctacacccttgaggccgtttacgaggccgtctttggaaagcccaaggagaaggtttacgcagaggagatagcgcaggcctgggagagcggggagggccttgaaagggttgcaagatactcgatggaggacgctaaggtgacctacgagctgggaagggagttcttcccgatggaggcccagctttcgaggcttataggccagagcctctgggacgtctcgcgctcgagcaccggaaatttggtggagtggttcctcctgcggaaggcctacaagaggaacgagctcgccccaaacaagcccgacgagagggagctcgcgagacggcgcgggggctacgctggcgggtacgttaaggaaccagagcggggattgtgggacaacattgtgtatttagacttccgctcgctgtatccttcaatcatcataacccacaacgtctcgccggataccctcaaccgcgagggctgtaaagagtacgacgtcgcccctgaggttggacacaagttctgcaaggacttccccggcttcataccaagcctcctgggagatttgctcgaggagaggcagaagataaagcggaagatgaaggcaacggttgacccgctggagaagaaactcctcgattacaggcagagggctatcaaaatcctcgccaacagcttctacggctactacggctacgccaaggcccggtggtactgcaaggagtgcgccgagagcgttacggcctggggaagggagtatatagaaatggttatccgggaactcgaagaaaaattcggttttaaagttctctatgccgatacagacggtctccatgctaccattcccggagcagacgctgaaacagtcaagaaaaaagcaaaggagttcttaaaatacattaatccaaaactgcccggcctgctcgaacttgagtacgagggcttctacgtgaggggcttcttcgtcacgaagaagaagtacgctgtgatagacgaggagggcaagataaccacgaggggtcttgagattgtgaggcgcgactggagcgagatagcgaaggagacccaggccagggtcttagaggcgatactcaagcacggtgacgtcgaggaggccgttaggatagtcaaggaagtgacggaaaagctgagcaagtatgaggtcccgcccgagaagctggtaatccacgagcagataacgcgcgatttgagggattacaaagccaccggcccgcacgttgccgttgcgaagaggctcgcggcgcgtggagtgaaaatccggcccggcacggtgataagctacatcgtcctaaagggctctggaaggataggcgacagggcgattccagctgatgagttcgacccgacgaagcaccgctacgatgcggaatactacatcgagaaccaggttctcccggcggtggagaggattctaaaagccttcggctatcggaaggaggatttgcgctaccagaagacgaagcaggtcggcttgggcgcgtggctgaaggtgaaggggaagaagtgaggaaaacccttttacccttgcaatacaaattgtatttcgag

SEQ ID NO: 786 - protein, 775 aa, Thermococcus sp.
  9degreesN polymerase, Thermococcus sp. strain 9degreesN-7 DNA polymerase A (PolA), no inteins
MILDTDYITENGKPVIRVFKKENGEFKIEYDRTFEPYFYALLKDDSAIEDVKKVTAKRHGTVVKVKRAEKVQKKFLGRPIEVWKLYFNHPQDVPAIRDRIRAHPAVVDIYEYDIPFAKRYLIDKGLIPMEGDEELTMLAFDIETLYHEGEEFGTGPILMISYADGSEARVITWKKIDLPYVDVVSTEKEMIKRFLRVVREKDPDVLITYNGDNFDFAYLKKRCEELGIKFTLGRDGSEPKIQRMGDRFAVEVKGRIHFDLYPVIRRTINLPTYTLEAVYEAVFGKPKEKVYAEEIAQAWESGEGLERVARYSMEDAKVTYELGREFFPMEAQLSRLIGQSLWDVSRSSTGNLVEWFLLRKAYKRNELAPNKPDERELARRRGGYAGGYVKEPERGLWDNIVYLDFRSLYPSIIITHNVSPDTLNREGCKEYDVAPEVGHKFCKDFPGFIPSLLGDLLEERQKIKRKMKATVDPLEKKLLDYRQRAIKILANSFYGYYGYAKARWYCKECAESVTAWGREYIEMVIRELEEKFGFKVLYADTDGLHATIPGADAETVKKKAKEFLKYINPKLPGLLELEYEGFYVRGFFVTKKKYAVIDEEGKITTRGLEIVRRDWSEIAKETQARVLEAILKHGDVEEAVRIVKEVTEKLSKYEVPPEKLVIHEQITRDLRDYKATGPHVAVAKRLAARGVKIRPGTVISYIVLKGSGRIGDRAIPADEFDPTKHRYDAEYYIENQVLPAVERILKAFGYRKEDLRYQKTKQVGLGAWLKVKGKK

SEQ ID NO: 787 - DNA, 5837 bp, Thermococcus litoralis
  Tli DNA polymerase, Vent polymerase, DNA-dependent DNA polymerase (pol) precursor with 3 exteins and 2 inteins
  CDS (291)..(5399): Tli DNA polymerase, Vent polymerase, DNA-dependent DNA polymerase (pol) precursor with 3 exteins and 2 inteins
  CDS join(291..1772,3387..3533,4704..5399): DNA-dependent DNA polymerase (pol)
  mat_peptide (1773)..(3386): PI-TliII endonuclease
  mat_peptide (1773)..(3386): I-TliI endonuclease
  misc_feature (3534)..(4703): intervening sequence 1 (IVS1)
  misc_feature (3534)..(4703): intervening sequence 2 (IVS2)
gaattcgcgataaaatctattttcttcctccatttttcaatttcaaaaacgtaagcatgagccaaacctctcgccctttctctgtccttcccgctaaccctcttgaaaactctctccaaagcattttttgatgaaagctcacgctcctctatgagggtcagtatatctgcaatgagttcgtgaagggttattctgtagaacaactccatgattttcgatttggatgggggtttaaaaatttggcggaacttttatttaatttgaactccagtttatatctggtggtatttatgatactggacactgattacataacaaaagatggcaagcctataatccgaatttttaagaaagagaacggggagtttaaaatagaacttgaccctcattttcagccctatatatatgctcttctcaaagatgactccgctattgaggagataaaggcaataaagggcgagagacatggaaaaactgtgagagtgctcgatgcagtgaaagtcaggaaaaaatttttgggaagggaagttgaagtctggaagctcattttcgagcatccccaagacgttccagctatgcggggcaaaataagggaacatccagctgtggttgacatttacgaatatgacataccctttgccaagcgttatctcatagacaagggcttgattcccatggagggagacgaggagcttaagctccttgcctttgatattgaaacgttttatcatgagggagatgaatttggaaagggcgagataataatgattagttatgccgatgaagaagaggccagagtaatcacatggaaaaatatcgatttgccgtatgtcgatgttgtgtccaatgaaagagaaatgataaagcgttttgttcaagttgttaaagaaaaagaccccgatgtgataataacttacaatggggacaattttgatttgccgtatctcataaaacgggcagaaaagctgggagttcggcttgtcttaggaagggacaaagaacatcccgaacccaagattcagaggatgggtgatagttttgctgtggaaatcaagggtagaatccactttgatcttttcccagttgtgcgaaggacgataaacctcccaacgtatacgcttgaggcagtttatgaagcagttttaggaaaaaccaaaagcaaattaggagcagaggaaattgccgctatatgggaaacagaagaaagcatgaaaaaactagcccagtactcaatggaagatgctagggcaacgtatgagctcgggaaggaattcttccccatggaagctgagctggcaaagctgataggtcaaagtgtatgggacgtctcgagatcaagcaccggcaacctcgtggagtggtatcttttaagggtggcatacgcgaggaatgaacttgcaccgaacaaacctgatgaggaagagtataaacggcgcttaagaacaacttacctgggaggatatgtaaaagagccagaaaaaggtttgtgggaaaatatcatttatttggatttccgcagtctgtacccttcaataatagttactcacaacgtatccccagatacccttgaaaaagagggctgtaagaattacgatgttgctccgatagtaggatataggttctgcaaggactttccgggctttattccctccatactcggggacttaattgcaatgaggcaagatataaagaagaaaatgaaatccacaattgacccgatcgaaaagaaaatgctcgattataggcaaagggctattaaattgcttgcaaacagcatcttacccaacgagtggttaccaataattgaaaatggagaaataaaattcgtgaaaattggcgagtttataaactcttacatggaaaaacagaaggaaaacgttaaaacagtagagaatactgaagttctcgaagtaaacaacctttttgcattctcattcaacaaaaaaatcaaagaaagtgaagtcaaaaaagtcaaagccctcataagacataagtataaagggaaagcttatgagattcagcttagctctggtagaaaaattaacataactgctggccatagtctgtttacagttagaaatggagaaataaaggaagtttctggagatgggataaaagaaggtgaccttattgtagcaccaaagaaaattaaactcaatgaaaaaggggtaagcataaacattcccgagttaatctcagatctttccgaggaagaaacagccgacattgtgatgacgatttcagccaagggcagaaagaacttctttaaaggaatgctgagaactttaaggtggatgtttggagaagaaaatagaaggataagaacatttaatcgctatttgttccatctcgaaaaactaggccttatcaaactactgccccgcggatatgaagttactgactgggagagattaaagaaatataaacaactttacgagaagcttgctggaagcgttaagtacaacggaaacaagagagagtatttagtaatgttcaacgagatcaaggattttatatcttacttcccacaaaaagagctcgaagaatggaaaattggaactctcaatggctttagaacgaattgtattctcaaagtcgatgaggattttgggaagctcctaggttactatgttagtgagggctatgcaggtgcacaaaaaaataaaactggtggtatcagttattcggtgaagctttacaatgaggaccctaatgttcttgagagcatgaaaaatgttgcagaaaaattctttggcaaggttagagttgacagaaattgcgtaagtatatcaaagaagatggcatacttagttatgaaatgcctctgtggagcattagccgaaaacaagagaattccttctgttatactcacctctcccgaaccggtacggtggtcatttttagaggcgtattttacaggcgatggagatatacatccatcaaaaaggtttaggctctcaacaaaaagcgagctccttgcaaatcagcttgtgttcttgctgaactctttgggaatatcctctgtaaagataggctttgacagtggggtctatagagtgtatataaatgaagacctgcaatttccacaaacgtctagggagaaaaacacatactactctaacttaattcccaaagagatccttagggacgtgtttggaaaagagttccaaaagaacatgacgttcaagaaatttaaagagcttgttgactctggaaaacttaacagggagaaagccaagctcttggagttcttcattaatggagatattgtccttgacagagtcaaaagtgttaaagaaaaggactatgaagggtatgtctatgacctaagcgttgaggataacgagaactttcttgttggttttggtttgctctatgctcacaacagctattacggctatatggggtatcctaaggcaagatggtactcgaaggaatgtgctgaaagcgttaccgcatgggggagacactacatagagatgacgataagagaaatagaggaaaagttcggctttaaggttctttatgcggacagtgtctcaggagaaagtgagatcataataaggcaaaacggaaagattagatttgtgaaaataaaggatcttttctctaaggtggactacagcattggcgaaaaagaatactgcattctcgaaggtgttgaagcactaactctggacgatgacggaaagcttgtctggaagcccgtcccctacgtgatgaggcacagagcgaataaaagaatgttccgcatctggctgaccaacagctggtatatagatgttactgaggatcattctctcataggctatctaaacacgtcaaaaacgaaaactgccaaaaaaatcggggaaagactaaaggaagtaaagccttttgaattaggcaaagcagtaaaatcgctcatatgcccaaatgcaccgttaaaggatgagaataccaaaactagcgaaatagcagtaaaattctgggagctcgtaggattgattgtaggagatggaaactggggtggagattctcgttgggcagagtattatcttggactttcaacaggcaaagatgcagaagagataaagcaaaaacttctggaacccctaaaaacttatggagtaatctcaaactattacccaaaaaacgagaaaggggacttcaacatcttggcaaagagccttgtaaagtttatgaaaaggcactttaaggacgaaaaaggaagacgaaaaattccagagttcatgtatgagcttccggttacttacatagaggcatttctacgaggactgttttcagctgatggtactgtaactatcaggaagggagttccagagatcaggctaacaaacattgatgctgactttctaagggaagtaaggaagcttctgtggattgttggaatttcaaattcaatatttgctgagactactccaaatcgctacaatggtgtttctactggaacctactcaaagcatctaaggatcaaaaataagtggcgttttgctgaaaggataggctttttaatcgagagaaagcagaagagacttttagaacatttaaaatcagcgagggtaaaaaggaataccatagattttggctttgatcttgtgcatgtgaaaaaagtcgaagagataccatacgagggttacgtttatgacattgaagtcgaagagacgcataggttctttgcaaacaacatcctggtacacaatactgacggcttttatgccacaatacccggggaaaagcctgaactcattaaaaagaaagccaaggaattcctaaactacataaactccaaacttccaggtctgcttgagcttgagtatgagggcttttacttgagaggattctttgttacaaaaaagcgctatgcagtcatagatgaagagggcaggataacaacaaggggcttggaagtagtaaggagagattggagtgagatagctaaggagactcaggcaaaggttttagaggctatacttaaagagggaagtgttgaaaaagctgtagaagttgttagagatgttgtagagaaaatagcaaaatacagggttccacttgaaaagcttgttatccatgagcagattaccagggatttaaaggactacaaagccattggccctcatgtcgcgatagcaaaaagacttgccgcaagagggataaaagtgaaaccgggcacaataataagctatatcgttctcaaagggagcggaaagataagcgatagggtaattttacttacagaatacgatcctagaaaacacaagtacgatccggactactacatagaaaaccaagttttgccggcagtacttaggatactcgaagcgtttggatacagaaaggaggatttaaggtatcaaagctcaaaacaaaccggcttagatgcatggctcaagaggtagctctgttgctttttagtccaagtttctccgcgagtctctctatctctcttttgtattctgctatgtggttttcattcactattaagtagtccgccaaagccataacgcttccaattccaaacttgagctctttccagtctctggcctcaaattcactccatgtttttggatcgtcgcttctccctcttctgctaagcctctcgaatctttttcttggcgaagagtgtacagctatgatgattatctcttcctctggaaacgcatctttaaacgtctgaatttcatctagagacctcactccgtcgattataactgccttgtacttctttagtagttcttttacctttgggatcgttaattttgccacggcattgtccccaagctcctgcctaagctgaatgctcacactgttcataccttcgggagttcttgggatcc

SEQ ID NO: 788 - protein, 1702 aa, Thermococcus litoralis
  Tli DNA polymerase, Vent polymerase, DNA-dependent DNA polymerase precursor with 3 exteins and 2 inteins
MILDTDYITKDGKPIIRIFKKENGEFKIELDPHFQPYIYALLKDDSAIEEIKAIKGERHGKTVRVLDAVKVRKKFLGREVEVWKLIFEHPQDVPAMRGKIREHPAVVDIYEYDIPFAKRYLIDKGLIPMEGDEELKLLAFDIETFYHEGDEFGKGEIIMISYADEEEARVITWKNIDLPYVDVVSNEREMIKRFVQVVKEKDPDVIITYNGDNFDLPYLIKRAEKLGVRLVLGRDKEHPEPKIQRMGDSFAVEIKGRIHFDLFPVVRRTINLPTYTLEAVYEAVLGKTKSKLGAEEIAAIWETEESMKKLAQYSMEDARATYELGKEFFPMEAELAKLIGQSVWDVSRSSTGNLVEWYLLRVAYARNELAPNKPDEEEYKRRLRTTYLGGYVKEPEKGLWENIIYLDFRSLYPSIIVTHNVSPDTLEKEGCKNYDVAPIVGYRFCKDFPGFIPSILGDLIAMRQDIKKKMKSTIDPIEKKMLDYRQRAIKLLANSILPNEWLPIIENGEIKFVKIGEFINSYMEKQKENVKTVENTEVLEVNNLFAFSFNKKIKESEVKKVKALIRHKYKGKAYEIQLSSGRKINITAGHSLFTVRNGEIKEVSGDGIKEGDLIVAPKKIKLNEKGVSINIPELISDLSEEETADIVMTISAKGRKNFFKGMLRTLRWMFGEENRRIRTFNRYLFHLEKLGLIKLLPRGYEVTDWERLKKYKQLYEKLAGSVKYNGNKREYLVMFNEIKDFISYFPQKELEEWKIGTLNGFRTNCILKVDEDFGKLLGYYVSEGYAGAQKNKTGGISYSVKLYNEDPNVLESMKNVAEKFFGKVRVDRNCVSISKKMAYLVMKCLCGALAENKRIPSVILTSPEPVRWSFLEAYFTGDGDIHPSKRFRLSTKSELLANQLVFLLNSLGISSVKIGFDSGVYRVYINEDLQFPQTSREKNTYYSNLIPKEILRDVFGKEFQKNMTFKKFKELVDSGKLNREKAKLLEFFINGDIVLDRVKSVKEKDYEGYVYDLSVEDNENFLVGFGLLYAHNSYYGYMGYPKARWYSKECAESVTAWGRHYIEMTIREIEEKFGFKVLYADSVSGESEIIIRQNGKIRFVKIKDLFSKVDYSIGEKEYCILEGVEALTLDDDGKLVWKPVPYVMRHRANKRMFRIWLTNSWYIDVTEDHSLIGYLNTSKTKTAKKIGERLKEVKPFELGKAVKSLICPNAPLKDENTKTSEIAVKFWELVGLIVGDGNWGGDSRWAEYYLGLSTGKDAEEIKQKLLEPLKTYGVISNYYPKNEKGDFNILAKSLVKFMKRHFKDEKGRRKIPEFMYELPVTYIEAFLRGLFSADGTVTIRKGVPEIRLTNIDADFLREVRKLLWIVGISNSIFAETTPNRYNGVSTGTYSKHLRIKNKWRFAERIGFLIERKQKRLLEHLKSARVKRNTIDFGFDLVHVKKVEEIPYEGYVYDIEVEETHRFFANNILVHNTDGFYATIPGEKPELIKKKAKEFLNYINSKLPGLLELEYEGFYLRGFFVTKKRYAVIDEEGRITTRGLEVVRRDWSEIAKETQAKVLEAILKEGSVEKAVEVVRDVVEKIAKYRVPLEKLVIHEQITRDLKDYKAIGPHVAIAKRLAARGIKVKPGTIISYIVLKGSGKISDRVILLTEYDPRKHKYDPDYYIENQVLPAVLRILEAFGYRKEDLRYQSSKQTGLDAWLKR

SEQ ID NO: 789 - protein, 774 aa, Thermococcus litoralis
  Tli DNA polymerase, Vent polymerase, DNA-dependent DNA polymerase with inteins removed
MILDTDYITKDGKPIIRIFKKENGEFKIELDPHFQPYIYALLKDDSAIEEIKAIKGERHGKTVRVLDAVKVRKKFLGREVEVWKLIFEHPQDVPAMRGKIREHPAVVDIYEYDIPFAKRYLIDKGLIPMEGDEELKLLAFDIETFYHEGDEFGKGEIIMISYADEEEARVITWKNIDLPYVDVVSNEREMIKRFVQVVKEKDPDVIITYNGDNFDLPYLIKRAEKLGVRLVLGRDKEHPEPKIQRMGDSFAVEIKGRIHFDLFPVVRRTINLPTYTLEAVYEAVLGKTKSKLGAEEIAAIWETEESMKKLAQYSMEDARATYELGKEFFPMEAELAKLIGQSVWDVSRSSTGNLVEWYLLRVAYARNELAPNKPDEEEYKRRLRTTYLGGYVKEPEKGLWENIIYLDFRSLYPSIIVTHNVSPDTLEKEGCKNYDVAPIVGYRFCKDFPGFIPSILGDLIAMRQDIKKKMKSTIDPIEKKMLDYRQRAIKLLANSYYGYMGYPKARWYSKECAESVTAWGRHYIEMTIREIEEKFGFKVLYADTDGFYATIPGEKPELIKKKAKEFLNYINSKLPGLLELEYEGFYLRGFFVTKKRYAVIDEEGRITTRGLEVVRRDWSEIAKETQAKVLEAILKEGSVEKAVEVVRDVVEKIAKYRVPLEKLVIHEQITRDLKDYKAIGPHVAIAKRLAARGIKVKPGTIISYIVLKGSGKISDRVILLTEYDPRKHKYDPDYYIENQVLPAVLRILEAFGYRKEDLRYQSSKQTGLDAWLKR

SEQ ID NO: 790 - DNA, 2626 bp, Thermus aquaticus
  Taq polymerase, DNA polymerase (PolI)
  CDS (121)..(2619): Taq polymerase, DNA polymerase (PolI)
aagctcagatctacctgcctgagggcgtccggttccagctggcccttcccgagggggagagggaggcgtttctaaaagcccttcaggacgctacccgggggcgggtggtggaagggtaacatgagggggatgctgcccctctttgagcccaagggccgggtcctcctggtggacggccaccacctggcctaccgcaccttccacgccctgaagggcctcaccaccagccggggggagccggtgcaggcggtctacggcttcgccaagagcctcctcaaggccctcaaggaggacggggacgcggtgatcgtggtctttgacgccaaggccccctccttccgccacgaggcctacggggggtacaaggcgggccgggcccccacgccggaggactttccccggcaactcgccctcatcaaggagctggtggacctcctggggctggcgcgcctcgaggtcccgggctacgaggcggacgacgtcctggccagcctggccaagaaggcggaaaaggagggctacgaggtccgcatcctcaccgccgacaaagacctttaccagctcctttccgaccgcatccacgtcctccaccccgaggggtacctcatcaccccggcctggctttgggaaaagtacggcctgaggcccgaccagtgggccgactaccgggccctgaccggggacgagtccgacaaccttcccggggtcaagggcatcggggagaagacggcgaggaagcttctggaggagtgggggagcctggaagccctcctcaagaacctggaccggctgaagcccgccatccgggagaagatcctggcccacatggacgatctgaagctctcctgggacctggccaaggtgcgcaccgacctgcccctggaggtggacttcgccaaaaggcgggagcccgaccgggagaggcttagggcctttctggagaggcttgagtttggcagcctcctccacgagttcggccttctggaaagccccaaggccctggaggaggccccctggcccccgccggaaggggccttcgtgggctttgtgctttcccgcaaggagcccatgtgggccgatcttctggccctggccgccgccagggggggccgggtccaccgggcccccgagccttataaagccctcagggacctgaaggaggcgcgggggcttctcgccaaagacctgagcgttctggccctgagggaaggccttggcctcccgcccggcgacgaccccatgctcctcgcctacctcctggacccttccaacaccacccccgagggggtggcccggcgctacggcggggagtggacggaggaggcgggggagcgggccgccctttccgagaggctcttcgccaacctgtgggggaggcttgagggggaggagaggctcctttggctttaccgggaggtggagaggcccctttccgctgtcctggcccacatggaggccacgggggtgcgcctggacgtggcctatctcagggccttgtccctggaggtggccgaggagatcgcccgcctcgaggccgaggtcttccgcctggccggccaccccttcaacctcaactcccgggaccagctggaaagggtcctctttgacgagctagggcttcccgccatcggcaagacggagaagaccggcaagcgctccaccagcgccgccgtcctggaggccctccgcgaggcccaccccatcgtggagaagatcctgcagtaccgggagctcaccaagctgaagagcacctacattgaccccttgccggacctcatccaccccaggacgggccgcctccacacccgcttcaaccagacggccacggccacgggcaggctaagtagctccgatcccaacctccagaacatccccgtccgcaccccgcttgggcagaggatccgccgggccttcatcgccgaggaggggtggctattggtggccctggactatagccagatagagctcagggtgctggcccacctctccggcgacgagaacctgatccgggtcttccaggaggggcgggacatccacacggagaccgccagctggatgttcggcgtcccccgggaggccgtggaccccctgatgcgccgggcggccaagaccatcaacttcggggtcctctacggcatgtcggcccaccgcctctcccaggagctagccatcccttacgaggaggcccaggccttcattgagcgctactttcagagcttccccaaggtgcgggcctggattgagaagaccctggaggagggcaggaggcgggggtacgtggagaccctcttcggccgccgccgctacgtgccagacctagaggcccgggtgaagagcgtgcgggaggcggccgagcgcatggccttcaacatgcccgtccagggcaccgccgccgacctcatgaagctggctatggtgaagctcttccccaggctggaggaaatgggggccaggatgctccttcaggtccacgacgagctggtcctcgaggccccaaaagagagggcggaggccgtggcccggctggccaaggaggtcatggagggggtgtatcccctggccgtgcccctggaggtggaggtggggataggggaggactggctctccgccaaggagtgataccacc

SEQ ID NO: 791 - protein, 832 aa, Thermus aquaticus [sequence omitted]

SEQ ID NO: 792 - DNA, 1728 bp, Bacteriophage phi-29
  Phi-29 polymerase, Bacillus phage phi29 polymerase
atgaagcatatgccgagaaagatgtatagttgtgactttgagacaactactaaagtggaagactgtagggtatgggcgtatggttatatgaatatagaagatcacagtgagtacaaaataggtaatagcctggatgagtttatggcgtgggtgttgaaggtacaagctgatctatatttccataacctcaaatttgacggagcttttatcattaactggttggaacgtaatggttttaagtggtcggctgacggattgccaaacacatataatacgatcatatctcgcatgggacaatggtacatgattgatatatgtttaggctacaaagggaaacgtaagatacatacagtgatatatgacagcttaaagaaactaccgtttcctgttaagaagatagctaaagactttaaactaactgttcttaaaggtgatattgattaccacaaagaaagaccagtcggctataagataacacccgaagaatacgcctatattaaaaacgatattcagattattgcggaagctctgttaattcagtttaagcaaggtttagaccggatgacagcaggcagtgacagtctaaaaggtttcaaggatattataaccactaagaaattcaaaaaggtgtttcctacattgagtcttggactcgataaggaagtgagatacgcctatagaggtggttttacatggttaaatgataggttcaaagaaaaagaaatcggagaaggcatggtcttcgatgttaatagtctatatcctgcacagatgtatagtcgtctccttccatatggtgaacctatagtattcgagggtaaatacgtttgggacgaagattacccactacacatacagcatatcagatgtgagttcgaattgaaagagggctatatacccactatacagataaaaagaagtaggttttataaaggtaatgagtacctaaaaagtagcggcggggagatagccgacctctggttgtcaaatgtagacctagaattaatgaaagaacactacgatttatataacgttgaatatatcagcggcttaaaatttaaagcaactacaggtttgtttaaagattttatagataaatggacgtacatcaagacgacatcagaaggagcgatcaagcaactagcaaaactgatgttaaacagtctatacggtaaattcgctagtaaccctgatgttacagggaaagtcccttatttaaaagagaatggggcgctaggtttcagacttggagaagaggaaacaaaagaccctgtttatacacctatgggcgttttcatcactgcatgggctagatacacgacaattacagcggcacaggcttgttatgatcggataatatactgtgatactgacagcatacatttaacgggtacagagatacctgatgtaataaaagatatagttgaccctaagaaattgggatactgggcacatgaaagtacattcaaaagagctaaatatctgagacagaagacctatatacaagacatctatatgaaagaagtagatggtaagttagtagaaggtagtccagatgattacactgatataaaatttagtgttaaatgtgcgggaatgactgacaagattaagaaagaggttacgtttgagaatttcaaagtcggattcagtcggaaaatgaagcctaagcctgtgcaagtgccgggcggggtggttctggttgatgacacattcacaatcaaataa

SEQ ID NO: 793 - protein, 575 aa, Bacteriophage phi-29 [sequence omitted]

SEQ ID NO: 794 - DNA, 3190 bp, Escherichia coli
  E. coli DNA polymerase I (polA), contains Klenow native polymerase
  CDS (301)..(3087): E. coli DNA polymerase I (polA), contains Klenow native polymerase
atccttaaggagaaaaataattcatatctatccacattagaaaaaatcccattatctcaattattagggatggatttatttttaactgcatgaaaaacaaagacaaacatcatgctgtaaaaagcatgataataaattaaaagcgatgtaaataatttatgcacaaagttatccacatgacgatttgcgagcgatccagaagatctacaaaagattttcacgaaaagcggtgaaaaactcatgttttcatcctgtctgtggcatcctttacccataatctgataaacaggcacggacattatggttcagatcccccaaaatccacttatccttgtagatggttcatcttatctttatcgcgcatatcacgcgtttcccccgctgactaacagcgcaggcgagccgaccggtgcgatgtatggtgtcctcaacatgctgcgcagtctgatcatgcaatataaaccgacgcatgcagcggtggtctttgacgccaagggaaaaacctttcgtgatgaactgtttgaacattacaaatcacatcgcccgccaatgccggacgatctgcgtgcacaaatcgaacccttgcacgcgatggttaaagcgatgggactgccgctgctggcggtttctggcgtagaagcggacgacgttatcggtactctggcgcgcgaagccgaaaaagccgggcgtccggtgctgatcagcactggcgataaagatatggcgcagctggtgacgccaaatattacgcttatcaataccatgacgaataccatcctcggaccggaagaggtggtgaataagtacggcgtgccgccagaactgatcatcgatttcctggcgctgatgggtgactcctctgataacattcctggcgtaccgggcgtcggtgaaaaaaccgcgcaggcattgctgcaaggtcttggcggactggatacgctgtatgccgagccagaaaaaattgctgggttgagcttccgtggcgcgaaaacaatggcagcgaagctcgagcaaaacaaagaagttgcttatctctcataccagctggcgacgattaaaaccgacgttgaactggagctgacctgtgaacaactggaagtgcagcaaccggcagcggaagagttgttggggctgttcaaaaagtatgagttcaaacgctggactgctgatgtcgaagcgggcaaatggttacaggccaaaggggcaaaaccagccgcgaagccacaggaaaccagtgttgcagacgaagcaccagaagtgacggcaacggtgatttcttatgacaactacgtcaccatccttgatgaagaaacactgaaagcgtggattgcgaagctggaaaaagcgccggtatttgcatttgataccgaaaccgacagccttgataacatctctgctaacctggtcgggctttcttttgctatcgagccaggcgtagcggcatatattccggttgctcatgattatcttgatgcgcccgatcaaatctctcgcgagcgtgcactcgagttgctaaaaccgctgctggaagatgaaaaggcgctgaaggtcgggcaaaacctgaaatacgatcgcggtattctggcgaactacggcattgaactgcgtgggattgcgtttgataccatgctggagtcctacattctcaatagcgttgccgggcgtcacgatatggacagcctcgcggaacgttggttgaagcacaaaaccatcacttttgaagagattgctggtaaaggcaaaaatcaactgacctttaaccagattgccctcgaagaagccggacgttacgccgccgaagatgcagatgtcaccttgcagttgcatctgaaaatgtggccggatctgcaaaaacacaaagggccgttgaacgtcttcgagaatatcgaaatgccgctggtgccggtgctttcacgcattgaacgtaacggtgtgaagatcgatccgaaagtgctgcacaatcattctgaagagctcacccttcgtctggctgagctggaaaagaaagcgcatgaaattgcaggtgaggaatttaacctttcttccaccaagcagttacaaaccattctctttgaaaaacagggcattaaaccgctgaagaaaacgccgggtggcgcgccgtcaacgtcggaagaggtactggaagaactggcgctggactatccgttgccaaaagtgattctggagtatcgtggtctggcgaagctgaaatcgacctacaccgacaagctgccgctgatgatcaacccgaaaaccgggcgtgtgcatacctcttatcaccaggcagtaactgcaacgggacgtttatcgtcaaccgatcctaacctgcaaaacattccggtgcgtaacgaagaaggtcgtcgtatccgccaggcgtttattgcgccagaggattatgtgattgtctcagcggactactcgcagattgaactgcgcattatggcgcatctttcgcgtgacaaaggcttgctgaccgcattcgcggaaggaaaagatatccaccgggcaacggcggcagaagtgtttggtttgccactggaaaccgtcaccagcgagcaacgccgtagcgcgaaagcgatcaactttggtctgatttatggcatgagtgctttcggtctggcgcggcaattgaacattccacgtaaagaagcgcagaagtacatggacctttacttcgaacgctaccctggcgtgctggagtatatggaacgcacccgtgctcaggcgaaagagcagggctacgttgaaacgctggacggacgccgtctgtatctgccggatatcaaatccagcaatggtgctcgtcgtgcagcggctgaacgtgcagccattaacgcgccaatgcagggaaccgccgccgacattatcaaacgggcgatgattgccgttgatgcgtggttacaggctgagcaaccgcgtgtacgtatgatcatgcaggtacacgatgaactggtatttgaagttcataaagatgatgttgatgccgtcgcgaagcagattcatcaactgatggaaaactgtacccgtctggatgtgccgttgctggtggaagtggggagtggcgaaaactgggatcaggcgcactaagattcgcctgaacatgccttttttcgtaagtaagcaacataagctgtcacgttttgtgatggctattagaaattcctatgcaacaactgaaaaaaaattacaa

SEQ ID NO: 795 - protein, 928 aa, Escherichia coli [sequence omitted]

SEQ ID NO: 796 - protein, 775 aa, Thermococcus sp.
  9degreesN polymerase, Thermococcus sp. strain 9degreesN-7 DNA polymerase
MILDTDYITENGKPVIRVFKKENGEFKIEYDRTFEPYFYALLKDDSAIEDVKKVTAKRHGTVVKVKRAEKVQKKFLGRPIEVWKLYFNHPQDVPAIRDRIRAHPAVVDIYEYDIPFAKRYLIDKGLIPMEGDEELTMLAFAIATLYHEGEEFGTGPILMISYADGSEARVITWKKIDLPYVDVVSTEKEMIKRFLRVVREKDPDVLITYNGDNFDFAYLKKRCEELGIKFTLGRDGSEPKIQRMGDRFAVEVKGRIHFDLYPVIRRTINLPTYTLEAVYEAVFGKPKEKVYAEEIAQAWESGEGLERVARYSMEDAKVTYELGREFFPMEAQLSRLIGQSLWDVSRSSTGNLVEWFLLRKAYKRNELAPNKPDERELARRRGGYAGGYVKEPERGLWDNIVYLDFRSLYPSIIITHNVSPDTLNREGCKEYDVAPEVGHKFCKDFPGFIPSLLGDLLEERQKIKRKMKATVDPLEKKLLDYRQRAIKILANSFYGYYGYAKARWYCKECAESVTAWGREYIEMVIRELEEKFGFKVLYADTDGLHATIPGADAETVKKKAKEFLKYINPKLPGLLELEYEGFYVRGFFVTKKKYAVIDEEGKITTRGLEIVRRDWSEIAKETQARVLEAILKHGDVEEAVRIVKEVTEKLSKYEVPPEKLVIHEQITRDLRDYKATGPHVAVAKRLAARGVKIRPGTVISYIVLKGSGRIGDRAIPADEFDPTKHRYDAEYYIENQVLPAVERILKAFGYRKEDLRYQKTKQVGLGAWLKVKGKK

SEQ ID NO: 797 - protein, 774 aa, Thermococcus kodakaraensis
  KOD1 DNA polymerase
MILDTDYITEDGKPVIRIFKKENGEFKIEYDRTFEPYFYALLKDDSAIEEVKKITAERHGTVVTVKRVEKVQKKFLGRPVEVWKLYFTHPQDVPAIRDKIREHPAVIDIYEYDIPFAKRYLIDKGLVPMEGDEELKMLAFDIETLYHEGEEFAEGPILMISYADEEGARVITWKNVDLPYVDVVSTEREMIKRFLRVVKEKDPDVLITYNGDNFDFAYLKKRCEKLGINFALGRDGSEPKIQRMGDRFAVEVKGRIHFDLYPVIRRTINLPTYTLEAVYEAVFGQPKEKVYAEEITTAWETGENLERVARYSMEDAKVTYELGKEFLPMEAQLSRLIGQSLWDVSRSSTGNLVEWFLLRKAYERNELAPNKPDEKELARRRQSYEGGYVKEPERGLWENIVYLDFRSLYPSIIITHNVSPDTLNREGCKEYDVAPQVGHRFCKDFPGFIPSLLGDLLEERQKIKKKMKATIDPIERKLLDYRQRAIKILANSYYGYYGYARARWYCKECAESVTAWGREYITMTIKEIEEKYGFKVIYSDTDGFFATIPGADAETVKKKAMEFLKYINAKLPGALELEYEGFYKRGFFVTKKKYAVIDEEGKITTRGLEIVRRDWSEIAKETQARVLEALLKDGDVEKAVRIVKEVTEKLSKYEVPPEKLVIHEQITRDLKDYKATGPHVAVAKRLAARGVKIRPGTVISYIVLKGSGRIGDRAIPFDEFDPTKHKYDAEYYIENQVLPAVERILRAFGYRKEDLRYQKTRQVGLSAWLKPKGT

SEQ ID NO: 798 - protein, 775 aa, Pyrococcus woesei
  PWO DNA polymerase
MILDVDYITEEGKPVIRLFKKENGKFKIEHDRTFRPYIYALLRDDSKIEEVKKITGERHGKIVRIVDVEKVEKKFLGKPITVWKLYLEHPQDVPTIREKVREHPAVVDIFEYDIPFAKRYLIDKGLIPMEGEEELKILAFDIETLYHEGEEFGKGPIIMISYADENEAKVITWKNIDLPYVEVVSSEREMIKRFLRIIREKDPDIIVTYNGDSFDFPYLAKRAEKLGIKLTIGRDGSEPKMQRIGDMTAVEVKGRIHFDLYHVITRTINLPTYTLEAVYEAIFGKPKEKVYADEIAKAWESGENLERVAKYSMEDAKATYELGKEFLPMEIQLSRLVGQPLWDVSRSSTGNLVEWFLLRKAYERNEVAPNKPSEEEYQRRLRESYTGGFVKEPEKGLWENIVYLDFRALYPSIIITHNVSPDTLNLEGCKNYDIAPQVGHKFCKDIPGFIPSLLGHLLEERQKIKTKMKETQDPIEKILLDYRQKAIKLLANSFYGYYGYAKARWYCKECAESVTAWGRKYIELVWKELEEKFGFKVLYIDTDGLYATIPGGESEEIKKKALEFVKYINSKLPGLLELEYEGFYKRGFFVTKKRYAVIDEEGKVITRGLEIVRRDWSEIAKETQARVLETILKHGDVEEAVRIVKEVIQKLANYEIPPEKLAIYEQITRPLHEYKAIGPHVAVAKKLAAKGVKIKPGMVIGYIVLRGDGPISNRAILAEEYDPKKHKYDAEYYIENQVLPAVLRILEGFGYRKEDLRYQKTRQVGLTSWLNIKKS

SEQ ID NO: 799 - protein, 775 aa, Pyrococcus furiosus; identical to SEQ ID NO: 798
  Pfu DNA polymerase

SEQ ID NO: 800 - protein, 4 aa, Artificial Sequence
  Description of Artificial Sequence:residue positions 354-357 of mutant 9degreesN-A485L DNA polymerase
EWFL

SEQ ID NO: 801 - protein, 4 aa, Artificial Sequence
  Description of Artificial Sequence:residue positions 354-357 of mutant 9degreesN DNA polymerase
EAFL

SEQ ID NO: 802 - protein, 4 aa, Artificial Sequence
  Description of Artificial Sequence:residue positions 354-357 of mutant 9degreesN DNA polymerase
MWFL

SEQ ID NO: 803 - protein, 4 aa, Artificial Sequence
  Description of Artificial Sequence:residue positions 354-357 of mutant 9degreesN DNA polymerase
EWFQ

SEQ ID NO: 804 - protein, 4 aa, Artificial Sequence
  Description of Artificial Sequence:residue positions 354-357 of mutant 9degreesN DNA polymerase
EWCL

SEQ ID NO: 805 - protein, 4 aa, Artificial Sequence
  Description of Artificial Sequence:residue positions 354-357 of mutant 9degreesN DNA polymerase
EWQL

SEQ ID NO: 806 - protein, 4 aa, Artificial Sequence
  Description of Artificial Sequence:residue positions 354-357 of mutant 9degreesN DNA polymerase
EWFW

SEQ ID NO: 807 - protein, 4 aa, Artificial Sequence
  Description of Artificial Sequence:residue positions 354-357 of mutant 9degreesN DNA polymerase
EWFE

SEQ ID NO: 808 - protein, 4 aa, Artificial Sequence
  Description of Artificial Sequence:residue positions 354-357 of mutant 9degreesN DNA polymerase
EWAL

SEQ ID NO: 809 - protein, 4 aa, Artificial Sequence
  Description of Artificial Sequence:residue positions 354-357 of mutant 9degreesN DNA polymerase
EWYL

SEQ ID NO: 810 - protein, 4 aa, Artificial Sequence
  Description of Artificial Sequence:residue positions 354-357 of mutant 9degreesN DNA polymerase
PAFL

SEQ ID NO: 811 - protein, 4 aa, Artificial Sequence
  Description of Artificial Sequence:residue positions 354-357 of mutant 9degreesN DNA polymerase
EWSL

SEQ ID NO: 812 - protein, 4 aa, Artificial Sequence
  Description of Artificial Sequence:residue positions 354-357 of mutant 9degreesN DNA polymerase
AAFL

SEQ ID NO: 813 - protein, 4 aa, Artificial Sequence
  Description of Artificial Sequence:residue positions 354-357 of mutant 9degreesN DNA polymerase
EAKL

SEQ ID NO: 814 - protein, 4 aa, Artificial Sequence
  Description of Artificial Sequence:residue positions 354-357 of mutant 9degreesN DNA polymerase
EWFK

SEQ ID NO: 815 - protein, 4 aa, Artificial Sequence
  Description of Artificial Sequence:residue positions 354-357 of mutant 9degreesN DNA polymerase
EWHL

SEQ ID NO: 816 - protein, 4 aa, Artificial Sequence
  Description of Artificial Sequence:residue positions 354-357 of mutant 9degreesN DNA polymerase
EWAS

SEQ ID NO: 817 - protein, 4 aa, Artificial Sequence
  Description of Artificial Sequence:residue positions 354-357 of mutant 9degreesN DNA polymerase
EAEL

SEQ ID NO: 818 - protein, 9 aa, Artificial Sequence
  Description of Artificial Sequence:residue positions 446-454 of mutant 9degreesN-A485L DNA polymerase
PGFIPSLLL

SEQ ID NO: 819 - protein, 9 aa, Artificial Sequence
  Description of Artificial Sequence:residue positions 446-454 of mutant 9degreesN DNA polymerase
PGFIPSLRL

SEQ ID NO: 820 - protein, 9 aa, Artificial Sequence
  Description of Artificial Sequence:residue positions 446-454 of mutant 9degreesN DNA polymerase
PGFYPSLLL

SEQ ID NO: 821 - protein, 9 aa, Artificial Sequence
  Description of Artificial Sequence:residue positions 446-454 of mutant 9degreesN DNA polymerase
PGMIPSLLL

SEQ ID NO: 822 - protein, 9 aa, Artificial Sequence
  Description of Artificial Sequence:residue positions 446-454 of mutant 9degreesN DNA polymerase
PGFIPPLLL

SEQ ID NO: 823 - protein, 9 aa, Artificial Sequence
  Description of Artificial Sequence:residue positions 446-454 of mutant 9degreesN DNA polymerase
PGFIPSYLL

SEQ ID NO: 824 - protein, 9 aa, Artificial Sequence
  Description of Artificial Sequence:residue positions 446-454 of mutant 9degreesN DNA polymerase
PGFIPSLHL

SEQ ID NO: 825 - protein, 9 aa, Artificial Sequence
  Description of Artificial Sequence:residue positions 446-454 of mutant 9degreesN DNA polymerase
PGFIPSLLP

SEQ ID NO: 826 - protein, 9 aa, Artificial Sequence
  Description of Artificial Sequence:residue positions 446-454 of mutant 9degreesN DNA polymerase
LGFIPSLLL

SEQ ID NO: 827 - protein, 9 aa, Artificial Sequence
  Description of Artificial Sequence:residue positions 446-454 of mutant 9degreesN DNA polymerase
PGFILSLLL

SEQ ID NO: 828 - protein, 9 aa, Artificial Sequence
  Description of Artificial Sequence:residue positions 446-454 of mutant 9degreesN DNA polymerase
PWFIPSLLL

SEQ ID NO: 829 - protein, 9 aa, Artificial Sequence
  Description of Artificial Sequence:residue positions 446-454 of mutant 9degreesN DNA polymerase
NGFIPSLLL

SEQ ID NO: 830 - protein, 9 aa, Artificial Sequence
  Description of Artificial Sequence:residue positions 446-454 of mutant 9degreesN DNA polymerase
PGFSPSLLL

SEQ ID NO: 831 - protein, 9 aa, Artificial Sequence
  Description of Artificial Sequence:residue positions 446-454 of mutant 9degreesN DNA polymerase
PGKIPSLLL

SEQ ID NO: 832 - protein, 9 aa, Artificial Sequence
  Description of Artificial Sequence:residue positions 446-454 of mutant 9degreesN DNA polymerase
PGFICSLLL

SEQ ID NO: 833 - protein, 9 aa, Artificial Sequence
  Description of Artificial Sequence:residue positions 446-454 of mutant 9degreesN DNA polymerase
PGFKPSLLL

SEQ ID NO: 834 - protein, 9 aa, Artificial Sequence
  Description of Artificial Sequence:residue positions 446-454 of mutant 9degreesN DNA polymerase
PGFIPSILL

SEQ ID NO: 835 - protein, 5 aa, Artificial Sequence
  Description of Artificial Sequence:residue positions 490-494 of mutant 9degreesN-A485 DNA polymerase
ANSFY

SEQ ID NO: 836 - protein, 5 aa, Artificial Sequence
  Description of Artificial Sequence:residue positions 490-494 of mutant 9degreesN DNA polymerase
ANSFR

SEQ ID NO: 837 - protein, 5 aa, Artificial Sequence
  Description of Artificial Sequence:residue positions 490-494 of mutant 9degreesN DNA polymerase
ACSFY

SEQ ID NO: 838 - protein, 5 aa, Artificial Sequence
  Description of Artificial Sequence:residue positions 490-494 of mutant 9degreesN DNA polymerase
ANSFC

SEQ ID NO: 839 - protein, 5 aa, Artificial Sequence
  Description of Artificial Sequence:residue positions 490-494 of mutant 9degreesN DNA polymerase
AYSFY

SEQ ID NO: 840 - protein, 5 aa, Artificial Sequence
  Description of Artificial Sequence:residue positions 490-494 of mutant 9degreesN DNA polymerase
ANSFD

SEQ ID NO: 841 - protein, 5 aa, Artificial Sequence
  Description of Artificial Sequence:residue positions 490-494 of mutant 9degreesN DNA polymerase
ANSFP

SEQ ID NO: 842 - protein, 5 aa, Artificial Sequence
  Description of Artificial Sequence:residue positions 490-494 of mutant 9degreesN DNA polymerase
ANGFY

SEQ ID NO: 843 - protein, 5 aa, Artificial Sequence
  Description of Artificial Sequence:residue positions 490-494 of mutant 9degreesN DNA polymerase
AWSFY

SEQ ID NO: 844 - protein, 5 aa, Artificial Sequence
  Description of Artificial Sequence:residue positions 490-494 of mutant 9degreesN DNA polymerase
ANSFK

SEQ ID NO: 845 - protein, 5 aa, Artificial Sequence
  Description of Artificial Sequence:residue positions 490-494 of mutant 9degreesN DNA polymerase
ANSTY

SEQ ID NO: 846 - protein, 5 aa, Artificial Sequence
  Description of Artificial Sequence:residue positions 490-494 of mutant 9degreesN DNA polymerase
ANSFL

SEQ ID NO: 847 - protein, 5 aa, Artificial Sequence
  Description of Artificial Sequence:residue positions 490-494 of mutant 9degreesN DNA polymerase
AFSFY

SEQ ID NO: 848 - protein, 5 aa, Artificial Sequence
  Description of Artificial Sequence:residue positions 490-494 of mutant 9degreesN DNA polymerase
ANSFW

SEQ ID NO: 849 - protein, 5 aa, Artificial Sequence
  Description of Artificial Sequence:residue positions 490-494 of mutant 9degreesN DNA polymerase
ADSFY

SEQ ID NO: 850 - protein, 5 aa, Artificial Sequence
  Description of Artificial Sequence:residue positions 490-494 of mutant 9degreesN DNA polymerase
ANSFV

SEQ ID NO: 851 - protein, 5 aa, Artificial Sequence
  Description of Artificial Sequence:residue positions 490-494 of mutant 9degreesN DNA polymerase
ANSFI

SEQ ID NO: 852 - protein, 5 aa, Artificial Sequence
  Description of Artificial Sequence:residue positions 490-494 of mutant 9degreesN DNA polymerase
ANSFM

SEQ ID NO: 853 - protein, 5 aa, Artificial Sequence
  Description of Artificial Sequence:residue positions 490-494 of mutant 9degreesN DNA polymerase
ANSFN

SEQ ID NO: 854 - protein, 5 aa, Artificial Sequence
  Description of Artificial Sequence:residue positions 490-494 of mutant 9degreesN DNA polymerase
ANSFE

SEQ ID NO: 855 - protein, 5 aa, Artificial Sequence
  Description of Artificial Sequence:residue positions 490-494 of mutant 9degreesN DNA polymerase
ANSVY

SEQ ID NO: 856 - protein, 5 aa, Artificial Sequence
  Description of Artificial Sequence:residue positions 490-494 of mutant 9degreesN DNA polymerase
AESFY

SEQ ID NO: 857 - protein, 5 aa, Artificial Sequence
  Description of Artificial Sequence:residue positions 490-494 of mutant 9degreesN DNA polymerase
ANSFG

SEQ ID NO: 858 - protein, 5 aa, Artificial Sequence
  Description of Artificial Sequence:residue positions 490-494 of mutant 9degreesN DNA polymerase
ANSFH

SEQ ID NO: 859 - protein, 5 aa, Artificial Sequence
  Description of Artificial Sequence:residue positions 490-494 of mutant 9degreesN DNA polymerase
ALSFY

SEQ ID NO: 860 - protein, 5 aa, Artificial Sequence
  Description of Artificial Sequence:residue positions 490-494 of mutant 9degreesN DNA polymerase
ANSIY

SEQ ID NO: 861 - protein, 5 aa, Artificial Sequence
  Description of Artificial Sequence:residue positions 490-494 of mutant 9degreesN DNA polymerase
ANSFT

SEQ ID NO: 862 - protein, 5 aa, Artificial Sequence
  Description of Artificial Sequence:residue positions 490-494 of mutant 9degreesN DNA polymerase
AVSFY

SEQ ID NO: 863 - protein, 5 aa, Artificial Sequence
  Description of Artificial Sequence:residue positions 490-494 of mutant 9degreesN DNA polymerase
AHSFY

SEQ ID NO: 864 - protein, 5 aa, Artificial Sequence
  Description of Artificial Sequence:residue positions 490-494 of mutant 9degreesN DNA polymerase
TNSFY

SEQ ID NO: 865 - protein, 5 aa, Artificial Sequence
  Description of Artificial Sequence:residue positions 490-494 of mutant 9degreesN DNA polymerase
APSFY

SEQ ID NO: 866 - protein, 5 aa, Artificial Sequence
  Description of Artificial Sequence:residue positions 490-494 of mutant 9degreesN DNA polymerase
ANSMY

SEQ ID NO: 867 - protein, 5 aa, Artificial Sequence
  Description of Artificial Sequence:residue positions 490-494 of mutant 9degreesN DNA polymerase
ANSFA

SEQ ID NO: 868 - protein, 5 aa, Artificial Sequence
  Description of Artificial Sequence:residue positions 490-494 of mutant 9degreesN DNA polymerase
AMSFY

SEQ ID NO: 869 - protein, 5 aa, Artificial Sequence
  Description of Artificial Sequence:residue positions 490-494 of mutant 9degreesN DNA polymerase
AGSFY

SEQ ID NO: 870 - protein, 5 aa, Artificial Sequence
  Description of Artificial Sequence:residue positions 490-494 of mutant 9degreesN DNA polymerase
ANSCY

SEQ ID NO: 871 - protein, 5 aa, Artificial Sequence
  Description of Artificial Sequence:residue positions 490-494 of mutant 9degreesN DNA polymerase
ANSAY

SEQ ID NO: 872 - protein, 5 aa, Artificial Sequence
  Description of Artificial Sequence:residue positions 490-494 of mutant 9degreesN DNA polymerase
AKSFY

SEQ ID NO: 873 - protein, 5 aa, Artificial Sequence
  Description of Artificial Sequence:residue positions 490-494 of mutant 9degreesN DNA polymerase
ANSFS

SEQ ID NO: 874 - protein, 5 aa, Artificial Sequence
  Description of Artificial Sequence:residue positions 490-494 of mutant 9degreesN DNA polymerase
ANSLY

SEQ ID NO: 875 - protein, 5 aa, Artificial Sequence
  Description of Artificial Sequence:residue positions 490-494 of mutant 9degreesN DNA polymerase
ARSFY

SEQ ID NO: 876 - protein, 5 aa, Artificial Sequence
  Description of Artificial Sequence:residue positions 490-494 of mutant 9degreesN DNA polymerase
ASSFY

SEQ ID NO: 877 - protein, 5 aa, Artificial Sequence
  Description of Artificial Sequence:residue positions 490-494 of mutant 9degreesN DNA polymerase
AASFY

SEQ ID NO: 878 - protein, 5 aa, Artificial Sequence
  Description of Artificial Sequence:residue positions 490-494 of mutant 9degreesN DNA polymerase
ANSHY

SEQ ID NO: 879 - protein, 11 aa, Artificial Sequence
  Description of Artificial Sequence:amino acid insert mutation of first region at position corresponding to position 329 of mutant 9degreesN-A485L DNA polymerase
REAQLSEFFPT

SEQ ID NO: 880 - protein, 13 aa, Artificial Sequence
  Description of Artificial Sequence:amino acid insert mutation of second region at position corresponding to position 485 of mutant 9degreesN-A485L DNA polymerase
PIKILANSYRQRW

SEQ ID NO: 881 - protein, 13 aa, Artificial Sequence
  Description of Artificial Sequence:amino acid insert mutation of second region at position corresponding to position 485 of mutant 9degreesN-A485L DNA polymerase
TIKILANSYRQRQ

SEQ ID NO: 882 - protein, 14 aa, Artificial Sequence
  Description of Artificial Sequence:amino acid insert mutation of second region at position corresponding to position 485 of mutant 9degreesN-A485L DNA polymerase
PIKILANLDYRQRL

SEQ ID NO: 883 - protein, 6 aa, Artificial Sequence
  Description of Artificial Sequence:6xHis histidine tag
HHHHHH

SEQ ID NO: 884 - DNA, 27 bp, Artificial Sequence
  Description of Artificial Sequence:primer extension assay template
cggctgcctggcgcgtcggagtgctca

SEQ ID NO: 885 - DNA, 19 bp, Artificial Sequence
  Description of Artificial Sequence:primer extension assay primer
  modified_base (1): n = t 5'-labeled with fluorophore FAM
ngagcactccgacgcgcca

SEQ ID NO: 886 - DNA, 27 bp, Artificial Sequence
  Description of Artificial Sequence:primer extension assay chemically synthesized "full length" primer control
  modified_base (1): n = t 5'-labeled with fluorophore FAM
ngagcactccgacgcgccaggcagccg

What is claimed is:

1. A mutant DNA polymerase, wherein the amino acid sequence of the phosphate region of said mutant DNA polymerase comprises two or more mutations not present in the phosphate region of the most closely related native DNA polymerase, and wherein said two or more phosphate region mutations increase the rate at which said mutant DNA polymerase incorporates a phosphate-labeled nucleotide.

2. The mutant DNA polymerase of claim 1, wherein said mutant DNA polymerase, or at least the phosphate region of said mutant polymerase, is derived from a Family A or Family B polymerase.

3. The mutant DNA polymerase of claim 2, wherein said mutant polymerase is a Family B polymerase.

4. The mutant DNA polymerase of claim 3, wherein said mutant polymerase is a 9°N DNA polymerase.

5. The mutant DNA polymerase of claim 4, wherein said mutant 9°N DNA polymerase incorporates phosphate-labeled nucleotides at an increased rate relative to 9°N-A485L DNA polymerase (SEQ ID NO: 2); and
wherein said mutant 9°N DNA polymerase comprises an alanine to leucine mutation at amino acid position 485; and
wherein said mutant 9°N DNA polymerase further comprises one or more additional mutations in the phosphate region of said mutant 9°N DNA polymerase.

6. The mutant 9°N DNA polymerase of claim 5, wherein said one or more additional mutations are selected from the group consisting of a mutation at amino acid position 352, 355, 408, 460, 461, 464, 480, 483, 484, and 497, and combinations thereof.

7. The mutant 9°N DNA polymerase of claim 5, wherein said one or more additional mutations comprises a mutation at amino acid position 484.

8. The mutant 9°N DNA polymerase of claim 5, wherein said one or more additional mutations includes mutations at amino acid positions 408, 464, and 484.

9. The mutant 9°N DNA polymerase of claim 8, wherein said mutation at position 408 is selected from the group consisting of tryptophan, glutamine, histidine glutamic acid, methionine, asparagine, lysine, and alanine; and wherein said mutation at position 464 is selected from the group consisting of glutamic acid and proline; and wherein said mutation at position 485 is tryptophan.

10. The mutant 9°N DNA polymerase of claim 8, wherein said amino acids at positions 408, 464, and 484 are tryptophan, glutamic acid, and tryptophan, respectively.

11. The mutant 9°N DNA polymerase of claim 5, wherein said mutant 9°N DNA polymerase incorporates phosphate-labeled nucleotides at an increased rate relative to 9°N-A485L DNA polymerase (SEQ ID NO: 2), and wherein said rate is at least three times faster than that catalyzed by 9°N-A485L DNA polymerase.

12. The mutant 9°N DNA polymerase of claim 5, wherein said mutant 9°N DNA polymerase incorporates phosphate-labeled nucleotides at an increased rate relative to 9°N-A485L DNA polymerase (SEQ ID NO: 2), and wherein said rate is at least seven times faster than that catalyzed by 9°N-A485L DNA polymerase.

13. The mutant 9°N DNA polymerase of claim 5, wherein said mutant 9°N DNA polymerase incorporates phosphate-labeled nucleotides at an increased rate relative to 9°N-A485L DNA polymerase (SEQ ID NO: 2), and wherein said rate is at least twenty times faster than that catalyzed by 9°N-A485L DNA polymerase.

14. The mutant 9°N DNA polymerase of claim 5, wherein said mutant 9°N DNA polymerase incorporates phosphate-labeled nucleotides at an increased rate relative to 9°N-A485L DNA polymerase (SEQ ID NO: 2), and wherein said rate is at least fifty times faster than that catalyzed by 9°N-A485L DNA polymerase.

15. The mutant 9°N DNA polymerase of SEQ ID NO. 568.

16. The mutant 9°N DNA polymerase of SEQ ID NO. 568, further comprising one or more additional mutations, wherein said one or more additional mutations are selected from the group consisting of an alteration in amino acid identity, an insertion of one or more amino acids, and the deletion of one or more amino acids.

17. The mutant 9°N DNA polymerase of SEQ ID NO. 568 and conservative modifications thereof.

18. The mutant 9°N DNA polymerase of claim 17, further comprising one or more additional mutations, wherein at least one additional mutation is in the phosphate region of said mutant 9°N DNA polymerase.

19. The mutant 9°N DNA polymerase of claim 18, wherein the additionally mutated amino acid is selected from the group consisting of the asparagine at position 491 and lysine at position 487.

20. A mutant 9°N DNA polymerase with an amino acid sequence selected from the group consisting of the even-numbered SEQ ID NOs 4 through 750.

21. A purified nucleic acid sequence encoding a polymerase of claim 20.

22. A method for identifying polymerases with improved suitability for a nucleotide sequencing process, wherein the improved suitability is measured relative to that of a parent polymerase, comprising:
(1) assaying the rate of phosphate-labeled nucleotide incorporation by a test mutant polymerase, wherein said phosphate region of said test polymerase is at least 90% identical to said parent polymerase;
(2) determining if said rate of phosphate-labeled nucleotide incorporation by said test mutant polymerase is suitable for said nucleotide sequencing process; and,
if said rate of phosphate-labeled nucleotide incorporation is suitable, then identifying the test mutant polymerase as such.

23. The method of claim 22, wherein if said rate of phosphate-labeled nucleotide incorporation is not suitable, repeating steps (1) and (2) with a second test mutant polymerase until a suitable polymerase is identified.

24. The method of claim 23, wherein said second test mutant comprises each of the mutations in the previous test mutant polymerase, and further comprises at least one additional mutation relative to the previous test mutant polymerase.

25. The method of claim 22, wherein said polymerase is a thermostable polymerase.

26. The method of claim 22, wherein the amino acid sequence of said parent polymerase is at least 90% identical to the amino acid sequence of 9°N-A485L DNA polymerase (SEQ ID NO: 2).

27. The method of claim 22, wherein the amino acid sequence of said parent polymerase is at least 95% identical to the amino acid sequence of 9°N-A485L DNA polymerase (SEQ ID NO: 2).

28. The method of claim 26, wherein said improved polymerase is a polymerase which incorporates between 1 and 20 phosphate-labeled nucleotides per second.

29. The method of claim 28, wherein said improved polymerase is a polymerase which incorporates between 5 and 15 phosphate-labeled nucleotides per second.

30. The method of claim 29, wherein said nucleotide sequencing process is a field-switch polynucleotide sequencing process.

31. A mutant polymerase identified by the method of claim 24.

32. A mutant polymerase identified by the method of claim 27.

33. A mutant DNA polymerase, wherein the amino acid sequence of the phosphate region of said mutant DNA polymerase comprises one or more mutations not present in the phosphate region of the most closely related native DNA polymerase, and wherein said one or more phosphate region mutations increase the rate at which said mutant DNA polymerase incorporates a phosphate-labeled nucleotide.

34. The mutant DNA polymerase of claim 33, wherein said mutant DNA polymerase is a Family A DNA polymerase.

35. The mutant DNA polymerase of claim 35, wherein said mutant polymerase is a mutant Klenow DNA polymerase.

36. The mutant DNA polymerase of claim 35, wherein said mutant Klenow polymerase incorporates phosphate-labeled nucleotides at an increased rate relative to the Klenow DNA polymerase of SEQ ID NO: 752; and
wherein said mutant Klenow DNA polymerase comprises one or more phosphate region mutations.

37. The mutant Klenow DNA polymerase of claim 36, wherein said one or more additional mutations are selected from the group consisting of a mutation at amino acid position 423 and 504, and combinations thereof.

38. The mutant Klenow DNA polymerase of claim 37, wherein the amino acid at position 423 is mutated.

39. The mutant Klenow DNA polymerase of claim 38, wherein the amino acid at position 504 is mutated.

40. The mutant Klenow DNA polymerase of claim 39, wherein the amino acid at position 423 is lysine or glutamic acid.

41. The mutant Klenow DNA polymerase of claim 40, wherein the amino acid at position 504 is glycine.

42. The mutant Klenow DNA polymerase of claim 41, wherein said mutant polymerase incorporates phosphate-labeled nucleotides at a rate at least three times faster than the Klenow polymerase of SEQ ID NO: 752.

43. The mutant Klenow DNA polymerase of SEQ ID NO: 756, 758, or 764.

44. A purified nucleotide acid encoding a mutant Klenow DNA polymerase of claim 43.

45. The mutant DNA polymerase of claim 34, wherein said mutant polymerase is a mutant Taq DNA polymerase.

46. The mutant DNA polymerase of claim 43, wherein said mutant Taq DNA polymerase incorporates phosphate-labeled nucleotides at an increased rate relative to the Taq DNA polymerase of SEQ ID NO: 766; and
wherein said mutant Taq DNA polymerase comprises one or more phosphate region mutations.

47. The mutant Taq DNA polymerase of claim 46, wherein said one or more additional mutations are selected from the group consisting of a mutation at amino acid positions 589, 617, 645, 691, 673, and 726, and combinations thereof.

48. The mutant Taq DNA polymerase of claim 47, wherein the amino acid at position 617 is isoleucine.

49. The mutant Taq DNA polymerase of claim 47, wherein the amino acid at position 645 is selected from the group consisting of histidine, phenylalanine, lysine and tryptophan.

50. The mutant Taq DNA polymerase of claim 47, wherein the amino acid at position 691 is tyrosine.

51. The mutant Taq DNA polymerase of claim 47, wherein the amino acid at position 693 is glycine.

52. The mutant Taq DNA polymerase of claim 47, wherein the amino acid at position 726 is serine.

53. The mutant Taq DNA polymerase of claim 47, wherein the amino acid at position 589 is aspartic acid and the amino acid at position 645 is histidine.

54. The mutant Taq DNA polymerase of claim 47, wherein said mutant polymerase incorporates phosphate-labeled nucleotides at a rate at least two times faster than the Taq polymerase of SEQ ID NO: 766.

55. The mutant Taq DNA polymerase of claim 47, wherein said mutant polymerase incorporates phosphate-labeled dinucleotides at a rate between five and fifteen times faster than the Taq polymerase of SEQ ID NO: 766.

56. The mutant Taq DNA polymerase of SEQ ID NO: 768, 770, 772, 774, 776, 778, 780, 782 or 784.

57. A purified nucleic acid encoding a mutant Taq DNA polymerase of claim 56.

58. A mutant DNA polymerase selected from the group consisting of the mutant DNA polymerases represented by the even-numbered sequences of SEQ ID NOs: 4-750, 754-764, and 768-784.

59. A mutant DNA polymerase wherein the phosphate region of said mutant DNA polymerase is identical to the phosphate region of a polymerase selected from the group consisting of the mutant DNA polymerases represented by the even-numbered sequences of SEQ ID NOs: 4-750, 754-764, and 768-784.

60. A mutant DNA polymerase selected from the group consisting of the mutant DNA polymerases represented by the even-numbered sequences of SEQ ID NOs: 4-750, wherein said mutant DNA polymerase incorporates phosphate-labeled nucleotides at an increased rate relative to the DNA polymerase of SEQ ID NO: 2.

61. A mutant DNA polymerase selected from the group consisting of the mutant DNA polymerases represented by the even-numbered sequences of SEQ ID NOs: 754-764, wherein said mutant DNA polymerase incorporates phosphate-labeled nucleotides at an increased rate relative to the DNA polymerase of SEQ ID NO: 752.

62. A mutant DNA polymerase selected from the group consisting of the mutant DNA polymerases represented by the even-numbered sequences of SEQ ID NOs: 768-784, wherein said mutant DNA polymerase incorporates phosphate-labeled nucleotides at an increased rate relative to the DNA polymerase of SEQ ID NO: 766.

63. The mutant polymerase of claims 60, 61 or 62, further comprising at least one anchor for attachment to a solid surface.

64. The mutant polymerase of claim 63, wherein said polymerase has at least two anchors.

65. The mutant DNA polymerase of claim 63, wherein said mutant DNA polymerase is used for DNA sequencing and genotyping.

66. The mutant DNA polymerase of claim 65, wherein said DNA sequencing is selected from the group consisting of charge-switch sequencing and electrokinetic sequencing.

67. The mutant DNA polymerase of claim 65, wherein said DNA sequencing is single DNA molecule sequencing.

68. The mutant DNA polymerase of claim 65, wherein said DNA genotyping is single DNA molecule genotyping.

69. A method of DNA sequencing, said method comprising:
(i) providing at least one complex comprising a target nucleic acid, a primer nucleic acid, and a mutant DNA polymerase;
(ii) contacting the complex with a plurality of charged particles comprising at least one type of phosphate-labeled nucleotide triphosphate (NTP) by applying an electric field;
(iii) reversing the electric field to transport unbound charged particles away from the surface; and
(iv) detecting the incorporation of said at least one type of γ-phosphate-labeled NTP into a single molecule of the primer nucleic acid.

70. The method of claim 69, wherein said mutant DNA polymerase is selected from the group consisting of any of the mutants set forth in claims 5, 36, and 46.

71. The method of claim 69, wherein said phosphate-labeled NTP is a γ-phosphate-labeled NTP.

72. The method of claim 71, wherein said γ-phosphate-labeled NTP is further labeled with polyethylene glycol (PEG).
